(19) United States
(12) Patent Application Publication
(10) Pub. No.: US 2022/0396623 A1
(43) Pub. Date: Dec. 15, 2022

(54) USES OF ANTI-ICOS ANTIBODIES

(71) Applicant: KYMAB LIMITED, Cambridge (GB)

(72) Inventor: Richard Charles Alfred SAINSON, Cambridge (GB)

(21) Appl. No.: 17/747,886

(22) Filed: May 18, 2022

Related U.S. Application Data
(60) Provisional application No. 63/190,016, filed on May 18, 2021.

(51) Int. Cl. C07K 16/28; A61P 35/00

(52) U.S. Cl. CPC C07K 16/2818; C07K 16/2827; A61P 35/00; A61K 2039/545

(57) ABSTRACT

Therapeutic use and dosing regimen of anti-ICOS antibodies or antigen-binding fragments thereof for modulating the ratio between regulatory T cells and effector T cells, stimulating the immune system of patients, and/or treating tumours or cancers, as monotherapy or combination therapy, e.g., with anti-PD-L1 antibodies or antigen-binding fragments thereof.

[0001] This application claims the benefit of U.S. Provisional Patent Application Ser. No. 63/190,016, filed May 18, 2021, the entire disclosure of which is hereby incorporated herein by reference.

[0002] The content of the electronically submitted sequence listing in ASCII text file (Name: 729617 SA9-642 ST25.txt; Size: 617.9 KB; Date of Creation: May 18, 2022) is incorporated herein by reference in its entirety.

### 1.2. FIELD OF THE INVENTION

[0003] This invention relates to compositions comprising an anti-ICOS antibody (which may comprise a full length antibody or an antigen-binding fragment thereof) for stimulating the mammalian immune response, especially the T cell response. The invention also relates to medical use of such compositions in immuno-oncology, including anti-tumour therapy by promotion of anti-tumour T cell response in a patient, as well as to use of the compositions in other diseases and conditions where it is of therapeutic benefit to modulate the balance between effector T cells and regulatory T cells in favour of effector T cell activity, for example through stimulation of effector T cells and/or through depletion of regulatory T cells. In some embodiments, the invention relates to an anti-ICOS antibody as monotherapy. In other embodiments, the invention relates to an anti-ICOS antibody as part of a combination therapy, e.g., further comprising an anti-PD-L1 antibody (which may comprise a full length antibody or an antigen-binding fragment thereof. The invention also relates to dosing amounts and/or frequencies of an anti-ICOS antibody (as monotherapy or as part of a combination therapy) that are surprisingly effective at stimulating a mammalian immune response, e.g., an anti-tumour T cell response, in a subject.

### 1.3. BACKGROUND

[0004] ICOS (Inducible T cell Co-Stimulator) is a member of the CD28 gene family involved in regulating immune responses, in particular humoral immune responses, first identified in 1999 [1]. It is a 55 kDa transmembrane protein, existing as a disulphide linked homodimer with two differentially glycosylated subunits. ICOS is exclusively expressed on T lymphocytes, and is found on a variety of T cell subsets. It is present at low levels on naïve T lymphocytes but its expression is rapidly induced upon immune activation, being upregulated in response to pro-inflammatory stimuli such as on engagement of TCR and co-stimulation with CD28 [2, 3]. ICOS plays a role in the late phase of T cell activation, memory T cell formation and importantly in the regulation of humoral responses through T cell dependent B cell responses [4, 5]. Intracellularly, ICOS binds PI3K and activates the kinases phophoinositide-dependent kinase 1 (PDK1) and protein kinase B (PKB). Activation of ICOS prevents cell death and upregulates cellular metabolism. In the absence of ICOS (ICOS knock-out) or in the presence of anti-ICOS neutralising antibodies there would be a suppression of pro-inflammatory responses.

[0005] ICOS binds to ICOS ligand (ICOSL) expressed on B-cells and antigen presenting cells (APC) [6, 7]. As a co-stimulatory molecule it serves to regulate TCR mediated immune responses and antibody responses to antigen. The expression of ICOS on T regulatory cells may be important, as it has been suggested that this cell type plays a negative role in immunosurveillance of cancer cells—there is emerging evidence for this in ovarian cancer [8]. Importantly, ICOS expression has been reported to be higher on intratumoural regulatory T cells (TRegs) compared with CD4+ and CD8+ effector cells that are present in the tumour microenvironment. Depletion of TRegs using antibodies with Fc-mediated cellular effector function has demonstrated strong anti-tumour efficacy in a pre-clinical model [9]. Mounting evidence implicates ICOS in an anti-tumour effect in both animal models as well as patients treated with immune-checkpoint inhibitors. In mice deficient in ICOS or ICOSL the anti-tumor effect of anti-CTLA4 therapy is diminished [10] while in normal mice ICOS ligand increases the effectiveness of anti-CTLA4 treatment in melanoma and prostate cancer [11].

[0006] Furthermore, in humans a retrospective study of advanced melanoma patients showed increased levels of ICOS following ipilimumab (anti-CTLA4) treatment [12]. In addition, ICOS expression is upregulated in bladder cancer patients treated with anti-CTLA4 [13]. It has also been observed that in cancer patients treated with anti-CTLA4 therapy the bulk of tumour specific IFN□ producing CD4 T-cells are ICOS positive while sustained elevation of ICOS positive CD4 T cells correlates with survival [12, 13, 14].

[0007] WO2016/120789 described anti-ICOS antibodies and proposed their use for activating T cells and for treating cancer, infectious disease and/or sepsis. A number of murine anti-ICOS antibodies were generated, of which a sub-set were reported to be agonists of the human ICOS receptor. The antibody “422.2” was selected as the lead anti-ICOS antibody and was humanised to produce a human “IgG4PE” antibody designated “H2L5”. H2L5 was reported to have an affinity of 1.34 nM for human ICOS and 0.95 nM for cynomolgus ICOS, to induce cytokine production in T cells, and to upregulate T cell activation markers in conjunction with CD3 stimulation. However, mice bearing implanted human melanoma cells were reported to show only minimal tumour growth delay or increase in survival when treated with H2L5 hIgG4PE, compared with control treated group. The antibody also failed to produce significant further inhibition of tumour growth in combination experiments with ipilimumab (anti-CTLA-4) or pembrolizumab (anti-PD-1), compared with ipilimumab or pembrolizumab monotherapy. Finally, In mice bearing implanted colon cancer cells (CT26), low doses of a mouse cross reactive surrogate of H2L5 in combination with a mouse surrogate of ipilimumab or pembrolizumab only mildly improved overall survival compared with anti-CTLA4 and anti-PD1 therapy alone. A similar lack of strong therapeutic benefit was shown in mice bearing implanted EMT6 cells.

[0008] WO2016/154177 described further examples of anti-ICOS antibodies. These antibodies were reported to be agonists of CD4+ T cells, including effector CD8+ T cells (TEff), and to deplete T regulator cells (TRegs). Selective effects of the antibodies on TEff vs TReg cells were described, whereby the antibodies could preferentially deplete TRegs while having minimal effect on TEffs that express a lower level of ICOS. The anti-ICOS antibodies were proposed for use in treating cancer, and combination therapy with anti-PD-1 or anti-PD-L1 antibodies was described.

### 1.4. SUMMARY OF THE INVENTION

[0009] An antibody to ICOS that acts to increase effector T cell activity represents a therapeutic approach in immunooncology and in other medical contexts where a CD8+ T cell response is beneficial, including various diseases and conditions and in vaccination regimens. In many diseases and conditions involving an immune component, a balance exists between effector T cells (TEff) which exert the CD8+ T cell immune response, and regulatory T cells (TReg) which suppress that immune response by downregulating TEffs. The present invention relates to antibodies that modulate this TEff/TReg balance in favour of effector T cell activity. Antibodies that trigger the depletion of ICOS highly positive regulatory T cells would relieve the suppression of TEffs, and thus have a net effect of promoting the effector T cell response. An additional or complementary mechanism for an anti-ICOS antibody is via agonistic activity at the ICOS receptor level, to stimulate the effector T cell response.

[0010] The relative expression of ICOS on effector T cells (TEff) compared with regulatory T cells (TReg), and the relative activities of these cell populations, will influence the overall effect of an anti-ICOS antibody in vivo. An envisaged mode of action combines agonism of effector T cells with depletion of ICOS positive regulatory T cells. Differential and even opposing effects on these two different T cell populations may be achievable due to their different levels of ICOS expression. Dual-engineering of the variable and constant regions respectively of an anti-ICOS antibody can provide a molecule that exerts a net positive effect on effector T cell response by affecting the CD8/TReg ratio. An antigen-binding domain of an agonist antibody, which activates the ICOS receptor, may be combined with an antibody constant (Fc) region that promotes downregulation and/or clearance of highly expressing cells to which the antibody is bound. An effector positive constant region may be used to recruit cellular effector functions against the target cells (TRegs), e.g., to promote antibody-dependent cell-mediated cytotoxicity (ADCC) or antibody dependent cell phagocytosis (ADCP). The antibody may thus act both to promote effector T cell activation and to downregulate immunosuppressive T Regulatory cells. Since ICOS is more highly expressed on TRegs than on TEffs, a therapeutic balance may be achieved whereby Teff function is promoted while TRegs are depleted, resulting in a net increase in the T cell immune response (e.g, anti-tumour response or other therapeutically beneficial T cell response).

[0011] Several pre-clinical and clinical studies have shown a strong positive correlation between high effector T-cell to T-reg cell ratio in the tumour microenvironment (TME) and overall survival. In ovarian cancer patients the ratio of CD8:T-reg cells has been reported to be an indicator of good clinical outcome [15]. A similar observation was made in metastatic melanoma patients after receiving ipilumumab [16]. In pre-clinical studies, it has also been shown that high effector cell:T-reg ratio in TME is associated with anti-tumour response [Error! Bookmark not defined.].

[0012] This invention provides antibodies that bind human ICOS, including those with efficacy at surprisingly low doses. The antibodies target the ICOS extracellular domain and thereby bind to T cells expressing ICOS. Examples are provided of antibodies that have been designed to have an agonistic effect on ICOS, thus enhancing the function of effector T cells, as indicated by an ability to increase IFNγ expression and secretion. As noted, anti-ICOS antibodies may also be engineered to deplete cells to which they bind, which should have the effect of preferentially downregulating regulatory T cells, lifting the suppressive effect of these cells on the effector T cell response and thus promoting the effector T cell response overall. Regardless of their mechanism of action, it is demonstrated empirically that anti-ICOS antibodies according to the present invention do stimulate T cell response and have anti-tumour effects in vivo, as shown in the Examples. Through selection of appropriate antibody formats such as those including constant regions with a desired level of Fc effector function, or absence of such effector function where appropriate, the anti-ICOS antibodies may be tailored for use in a variety of medical contexts including treatment of diseases and conditions in which an effector T cell response is beneficial and/or where suppression of regulatory T cells is desired.

[0013] Exemplary antibodies include STIM001, STIM002, STIM002-B, STIM003, STIM004, STIM005, STIM006, STIM007, STIM008 and STIM009, the sequences of which are set out herein.

[0014] In some embodiments, the invention provides a method of treating a disease or condition amenable to therapy by depleting regulatory T cells (Tregs) and/or increasing effector T cell (Teff) response in a subject in need thereof, the method comprising administering to the subject an anti-ICOS antibody or antigen-binding fragment thereof that binds the extracellular domain of human and/or mouse ICOS, wherein the anti-ICOS antibody or antigen-binding fragment thereof is administered to the subject at a dose of about 0.8 mg to 240 mg.

[0015] In some embodiments, the anti-ICOS antibody or antigen-binding fragment thereof used in the method of treating a disease or condition amenable to therapy by depleting regulatory T cells (Tregs) and/or increasing effector T cell (Teff) response comprises heavy chain complimentary determining regions (HCDRs) HCDR1, HCDR2, and HCDR3, and light chain complimentary determining regions (LCDRs) LCDR1, LCDR2, and LCDR3, wherein (a) HCDR1, HCDR2, and HCDR3 comprise sequences having at least 85%, 90%, or 95% sequence identity to the amino acid sequences SEQ ID NO: 363, SEQ ID NO: 364, and SEQ ID NO: 365 and LCDR1, LCDR2, and LCDR3 comprise sequences having at least 85%, 90%, or 95% sequence identity to the amino acid sequences SEQ ID NO: 370, SEQ ID NO: 371, SEQ ID NO: 372; (b) HCDR1, HCDR2, and HCDR3 comprise the sequences having at least 85%, 90%, or 95% sequence identity to the amino acid sequences SEQ ID NO: 377, SEQ ID NO: 378, and SEQ ID NO: 379 and LCDR1, LCDR2, and LCDR3 comprise the sequences having at least 85%, 90%, or 95% sequence identity to the amino acid sequences SEQ ID NO: 384, SEQ ID NO: 385, SEQ ID NO: 386; (c) HCDR1, HCDR2, and HCDR3 comprise the sequences having at least 85%, 90%, or 95% sequence identity to the amino acid sequences SEQ ID NO: 391, SEQ ID NO: 392, and SEQ ID NO: 393 and LCDR1, LCDR2, and LCDR3 comprise the sequences having at least 85%, 90%, or 95% sequence identity to the amino acid sequences SEQ ID NO: 398, SEQ ID NO: 399, SEQ ID NO: 400; (d) HCDR1, HCDR2, and HCDR3 comprise the sequences having at least 85%, 90%, or 95% sequence identity to the amino acid sequences SEQ ID NO: 405, SEQ ID NO: 406, and SEQ ID NO: 407 and LCDR1, LCDR2, and LCDR3 comprise the sequences having at least 85%, 90%, or 95% sequence identity to the amino acid sequences SEQ ID NO: 412, SEQ ID NO: 413, SEQ ID NO: 414; (e) HCDR1, HCDR2, and HCDR3 comprise the sequences having at least 85%, 90%, or 95% sequence identity to the amino acid sequences SEQ ID NO: 419, SEQ ID NO: 420, and SEQ ID NO: 421 and LCDR1, LCDR2, and LCDR3 comprise the sequences having at least 85%, 90%, or 95% sequence identity to the amino acid sequences SEQ ID NO: 426, SEQ ID NO: 427, SEQ ID NO: 428; (0 HCDR1, HCDR2, and HCDR3 comprise the sequences having at least 85%, 90%, or 95% sequence identity to the amino acid sequences SEQ ID NO: 435, SEQ ID NO: 436, and SEQ ID NO: 437 and LCDR1, LCDR2, and LCDR3 comprise the sequences having at least 85%, 90%, or 95% sequence identity to the amino acid sequences SEQ ID NO: 442, SEQ ID NO: 443, SEQ ID NO: 444; (g) HCDR1, HCDR2, and HCDR3 comprise the sequences having at least 85%, 90%, or 95% sequence identity to the amino acid sequences SEQ ID NO: 449, SEQ ID NO: 450, and SEQ ID NO: 451 and LCDR1, LCDR2, and LCDR3 comprise the sequences having at least 85%, 90%, or 95% sequence identity to the amino acid sequences SEQ ID NO: 456, SEQ ID NO: 457, SEQ ID NO: 458; (h) HCDR1, HCDR2, and HCDR3 comprise the sequences having at least 85%, 90%, or 95% sequence identity to the amino acid sequences SEQ ID NO: 463, SEQ ID NO: 464, and SEQ ID NO: 465 and LCDR1, LCDR2, and LCDR3 comprise the sequences having at least 85%, 90%, or 95% sequence identity to the amino acid sequences SEQ ID NO: 470, SEQ ID NO: 471, SEQ ID NO: 472; (i) HCDR1, HCDR2, and HCDR3 comprise the sequences having at least 85%, 90%, or 95% sequence identity to the amino acid sequences SEQ ID NO: 477, SEQ ID NO: 478, and SEQ ID NO: 479 and LCDR1, LCDR2, and LCDR3 comprise the sequences having at least 85%, 90%, or 95% sequence identity to the amino acid sequences SEQ ID NO: 484, SEQ ID NO: 485, SEQ ID NO: 486, or (j) HCDR1, HCDR2, and HCDR3 comprise the sequences having at least 85%, 90%, or 95% sequence identity to the amino acid sequences SEQ ID NO: 491, SEQ ID NO: 492, and SEQ ID NO: 493 and LCDR1, LCDR2, and LCDR3 comprise the sequences having at least 85%, 90%, or 95% sequence identity to the amino acid sequences SEQ ID NO: 498, SEQ ID NO: 499, SEQ ID NO: 500. In some embodiments, (a) HCDR1 comprises the amino acid sequence SEQ ID NO: 363, HCDR2 comprises the amino acid sequence SEQ ID NO: 364, HCDR3 comprises the amino acid sequence SEQ ID NO: 365, LCDR1 comprises the amino acid sequence SEQ ID NO: 370, LCDR2 comprises the amino acid sequence SEQ ID NO: 371, and LCDR3 comprises the amino acid sequence SEQ ID NO: 372; (b) HCDR1 comprises the amino acid sequence SEQ ID NO: 377, HCDR2 comprises the amino acid sequence SEQ ID NO: 378, HCDR3 comprises the amino acid sequence SEQ ID NO: 379, LCDR1 comprises the amino acid sequence SEQ ID NO: 384, LCDR2 comprises the amino acid sequence SEQ ID NO: 385, and LCDR3 comprises the amino acid sequence SEQ ID NO: 386; (c) HCDR1 comprises the amino acid sequence SEQ ID NO: 391, HCDR2 comprises the amino acid sequence SEQ ID NO: 392, HCDR3 comprises the amino acid sequence SEQ ID NO: 393, LCDR1 comprises the amino acid sequence SEQ ID NO: 398, LCDR2 comprises the amino acid sequence SEQ ID NO: 399, and LCDR3 comprises the amino acid sequence SEQ ID NO: 400; (d) HCDR1 comprises the amino acid sequence SEQ ID NO: 405, HCDR2 comprises the amino acid sequence SEQ ID NO: 406, HCDR3 comprises the amino acid sequence SEQ ID NO: 407, LCDR1 comprises the amino acid sequence SEQ ID NO: 412, LCDR2 comprises the amino acid sequence SEQ ID NO: 413, and LCDR3 comprises the amino acid sequence SEQ ID NO: 414; (e) HCDR1 comprises the amino acid sequence SEQ ID NO: 419, HCDR2 comprises the amino acid sequence SEQ ID NO: 420, HCDR3 comprises the amino acid sequence SEQ ID NO: 421, LCDR1 comprises the amino acid sequence SEQ ID NO: 426, LCDR2 comprises the amino acid sequence SEQ ID NO: 427, and LCDR3 comprises the amino acid sequence SEQ ID NO: 428; (0 HCDR1 comprises the amino acid sequence SEQ ID NO: 435, HCDR2 comprises the amino acid sequence SEQ ID NO: 436, HCDR3 comprises the amino acid sequence SEQ ID NO: 437, LCDR1 comprises the amino acid sequence SEQ ID NO: 442, LCDR2 comprises the amino acid sequence SEQ ID NO: 443, and LCDR3 comprises the amino acid sequence SEQ ID NO: 444; (g) HCDR1 comprises the amino acid sequence SEQ ID NO: 449, HCDR2 comprises the amino acid sequence SEQ ID NO: 450, HCDR3 comprises the amino acid sequence SEQ ID NO: 451, LCDR1 comprises the amino acid sequence SEQ ID NO: 456, LCDR2 comprises the amino acid sequence SEQ ID NO: 457, and LCDR3 comprises the amino acid sequence SEQ ID NO: 458; (h) HCDR1 comprises the amino acid sequence SEQ ID NO: 463, HCDR2 comprises the amino acid sequence SEQ ID NO: 464, HCDR3 comprises the amino acid sequence SEQ ID NO: 465, LCDR1 comprises the amino acid sequence SEQ ID NO: 470, LCDR2 comprises the amino acid sequence SEQ ID NO: 471, and LCDR3 comprises the amino acid sequence SEQ ID NO: 472; (i) HCDR1 comprises the amino acid sequence SEQ ID NO: 477, HCDR2 comprises the amino acid sequence SEQ ID NO: 478, HCDR3 comprises the amino acid sequence SEQ ID NO: 479, LCDR1 comprises the amino acid sequence SEQ ID NO: 484, LCDR2 comprises the amino acid sequence SEQ ID NO: 485, and LCDR3 comprises the amino acid sequence SEQ ID NO: 486; or (j) HCDR1 comprises the amino acid sequence SEQ ID NO: 491, HCDR2 comprises the amino acid sequence SEQ ID NO: 492, HCDR3 comprises the amino acid sequence SEQ ID NO: 493, LCDR1 comprises the amino acid sequence SEQ ID NO: 498, LCDR2 comprises the amino acid sequence SEQ ID NO: 499, and LCDR3 comprises the amino acid sequence SEQ ID NO: 500.

[0016] In another embodiment, the method of treating a disease or condition amenable to therapy by depleting regulatory T cells (Tregs) and/or increasing effector T cell (Teff) response comprises administering to the subject an anti-ICOS antibody or antigen-binding fragment thereof comprising an HCDR1 that comprises the amino acid sequence SEQ ID NO: 405, an HCDR2 that comprises the amino acid sequence SEQ ID NO: 406, an HCDR3 that comprises the amino acid sequence SEQ ID NO: 407, an LCDR1 that comprises the amino acid sequence SEQ ID NO: 412, an LCDR2 that comprises the amino acid sequence SEQ ID NO: 413, and an LCDR3 that comprises the amino acid sequence SEQ ID NO: 414.

[0017] In another embodiment, the method of treating a disease or condition amenable to therapy by depleting regulatory T cells (Tregs) and/or increasing effector T cell (Teff) response comprises administering to the subject an anti-ICOS antibody or antigen-binding fragment thereof comprising a heavy chain variable (VH) domain and a light chain variable (VL) domain, wherein (a) the VH domain comprises a sequence having at least 85%, 90%, or 95% sequence identity to the amino acid sequence SEQ ID NO: 366 and the VL domain comprises a sequence having at least 85%, 90%, or 95% sequence identity to the amino acid sequence SEQ ID NO: 373; (b) the VH domain comprises a sequence having at least 85%, 90%, or 95% sequence identity to the amino acid sequence SEQ ID NO: 380 and the VL domain comprises a sequence having at least 85%, 90%, or 95% sequence identity to the amino acid sequence SEQ ID NO: 387; (c) the VH domain comprises a sequence having at least 85%, 90%, or 95% sequence identity to the amino acid sequence SEQ ID NO: 394 and the VL domain comprises a sequence having at least 85%, 90%, or 95% sequence identity to the amino acid sequence SEQ ID NO: 401; (d) the VH domain comprises a sequence having at least 85%, 90%, or 95% sequence identity to the amino acid sequence SEQ ID NO: 408 and VL domain comprises a sequence having at least 85%, 90%, or 95% sequence identity to the amino acid sequence SEQ ID NO: 415; (e) the VH domain comprises a sequence having at least 85%, 90%, or 95% sequence identity to the amino acid sequence SEQ ID NO: 422 and the VL domain comprises a sequence having at least 85%, 90%, or 95% sequence identity to the amino acid sequence SEQ ID NO: 429; (0 the VH domain comprises a sequence having at least 85%, 90%, or 95% sequence identity to the amino acid sequence SEQ ID NO: 438 and the VL domain comprises a sequence having at least 85%, 90%, or 95% sequence identity to the amino acid sequence SEQ ID NO: 445; (g) the VH domain comprises a sequence having at least 85%, 90%, or 95% sequence identity to the amino acid sequence SEQ ID NO: 452 and VL domain comprises a sequence having at least 85%, 90%, or 95% sequence identity to the amino acid sequence SEQ ID NO: 459; (h) the VH domain comprises a sequence having at least 85%, 90%, or 95% sequence identity to the amino acid sequence SEQ ID NO: 467 and the VL domain comprises a sequence having at least 85%, 90%, or 95% sequence identity to the amino acid sequence SEQ ID NO: 473; (i) the VH domain comprises a sequence having at least 85%, 90%, or 95% sequence identity to the amino acid sequence SEQ ID NO 481: and the VL domain comprises a sequence having at least 85%, 90%, or 95% sequence identity to the amino acid sequence SEQ ID NO: 488; or (j) the VH domain comprises a sequence having at least 85%, 90%, or 95% sequence identity to the amino acid sequence SEQ ID NO: 494 and the VL domain comprises a sequence having at least 85%, 90%, or 95% sequence identity to the amino acid sequence SEQ ID NO: 501. In some embodiments, (a) the VH domain comprises the amino acid sequence SEQ ID NO: 366 and the VL domain comprises the amino acid sequence SEQ ID NO: 373; (b) the VH domain comprises the amino acid sequence SEQ ID NO: 380 and the VL domain comprises the amino acid sequence SEQ ID NO: 387; (c) the VH domain comprises the amino acid sequence SEQ ID NO: 394 and the VL domain comprises the amino acid sequence SEQ ID NO: 401; (d) the VH domain comprises the amino acid sequence SEQ ID NO: 408 and the VL domain comprises the amino acid sequence SEQ ID NO: 415; (e) the VH domain comprises the amino acid sequence SEQ ID NO: 422 and the VL domain comprises the amino acid sequence SEQ ID NO: 429; (0 the VH domain comprises the amino acid sequence SEQ ID NO: 438 and the VL domain comprises the amino acid sequence SEQ ID NO: 445; (g) the VH domain comprises the amino acid sequence SEQ ID NO: 452 and the VL domain comprises the amino acid sequence SEQ ID NO: 459; (h) the VH domain comprises the amino acid sequence SEQ ID NO: 467 and the VL domain comprises the amino acid sequence SEQ ID NO: 473; (i) the VH domain comprises the amino acid sequence SEQ ID NO: 480 and the VL domain comprises the amino acid sequence SEQ ID NO: 487; or (j) the VH domain comprises the amino acid sequence SEQ ID NO: 494 and the VL domain comprises the amino acid sequence SEQ ID NO: 501.

[0018] In another embodiment, the method of treating a disease or condition amenable to therapy by depleting regulatory T cells (Tregs) and/or increasing effector T cell (Teff) response comprises administering to the subject an anti-ICOS antibody or antigen-binding fragment thereof comprising a VH domain comprising a sequence having at least 95% sequence identity to SEQ ID NO: 408 and a VL domain comprising a sequence having at least 95% sequence identity to SEQ ID NO: 415. In some embodiments, the VH domain comprises the amino acid sequence SEQ ID NO: 408 and the VL domain comprises the amino acid sequence SEQ ID NO: 415.

[0019] In another embodiment, the method of treating a disease or condition amenable to therapy by depleting regulatory T cells (Tregs) and/or increasing effector T cell (Teff) response comprises administering to the subject an anti-ICOS antibody or antigen-binding fragment thereof comprising a heavy chain and a light chain, wherein (a) the heavy chain comprises a sequence having at least 85%, 90%, or 95% sequence identity to the amino acid sequence SEQ ID NO: 368 and the light chain comprises a sequence having at least 85%, 90%, or 95% sequence identity to the amino acid sequence SEQ ID NO: 375; (b) the heavy chain comprises a sequence having at least 85%, 90%, or 95% sequence identity to the amino acid sequence SEQ ID NO: 385 and the light chain comprises a sequence having at least 85%, 90%, or 95% sequence identity to the amino acid sequence SEQ ID NO: 389; (c) the heavy chain comprises a sequence having at least 85%, 90%, or 95% sequence identity to the amino acid sequence SEQ ID NO: 396 and the light chain comprises a sequence having at least 85%, 90%, or 95% sequence identity to the amino acid sequence SEQ ID NO: 403; (d) the heavy chain comprises a sequence having at least 85%, 90%, or 95% sequence identity to the amino acid sequence SEQ ID NO: 410 and the light chain comprises a sequence having at least 85%, 90%, or 95% sequence identity to the amino acid sequence SEQ ID NO: 417; (e) the heavy chain comprises a sequence having at least 85%, 90%, or 95% sequence identity to the amino acid sequence SEQ ID NO: 424 and the light chain comprises a sequence having at least 85%, 90%, or 95% sequence identity to the amino acid sequence SEQ ID NO: 432; (f) the heavy chain comprises a sequence having at least 85%, 90%, or 95% sequence identity to the amino acid sequence SEQ ID NO: 440 and the light chain comprises a sequence having at least 85%, 90%, or 95% sequence identity to the amino acid sequence SEQ ID NO: 447; (g) the heavy chain comprises a sequence having at least 85%, 90%, or 95% sequence identity to the amino acid sequence SEQ ID NO: 454 and the light chain comprises a sequence having at least 85%, 90%, or 95% sequence identity to the amino acid sequence SEQ ID NO: 461; (h) the heavy chain comprises a sequence having at least 85%, 90%, or 95% sequence identity to the amino acid sequence SEQ ID NO: 468 and the light chain comprises a sequence having at least 85%, 90%, or 95% sequence identity to the amino acid sequence SEQ ID NO: 475; (i) the heavy chain comprises a sequence having at least 85%, 90%, or 95% sequence identity to the amino acid sequence SEQ ID NO: 482 and the light chain comprises a sequence having at least 85%, 90%, or 95% sequence identity to the amino acid sequence SEQ ID NO: 489; or (j) the heavy chain comprises a sequence having at least 85%, 90%, or 95% sequence identity to the amino acid sequence SEQ ID NO: 496 and the light chain comprises a sequence having at least 85%, 90%, or 95% sequence identity to the amino acid sequence SEQ ID NO: 503. In some embodiments, (a) the heavy chain comprises the amino acid sequence SEQ ID NO: 368 and the light chain comprises the amino acid sequence SEQ ID NO: 375; (b) the heavy chain comprises the amino acid sequence SEQ ID NO: 382 and the light chain comprises the amino acid sequence SEQ ID NO: 389; (c) the heavy chain comprises the amino acid sequence SEQ ID NO: 396 and the light chain comprises the amino acid sequence SEQ ID NO: 403; (d) the heavy chain comprises the amino acid sequence SEQ ID NO: 410 and the light chain comprises the amino acid sequence SEQ ID NO: 417; (e) the heavy chain comprises the amino acid sequence SEQ ID NO: 424 and the light chain comprises the amino acid sequence SEQ ID NO: 432; (0 the heavy chain comprises the amino acid sequence SEQ ID NO: 440 and the light chain comprises the amino acid sequence SEQ ID NO: 447; (g) the heavy chain comprises the amino acid sequence SEQ ID NO: 454 and the light chain comprises the amino acid sequence SEQ ID NO: 461; (h) the heavy chain comprises the amino acid sequence SEQ ID NO: 468 and the light chain comprises the amino acid sequence SEQ ID NO: 475; (i) the heavy chain comprises the amino acid sequence SEQ ID NO: 482 and the light chain comprises the amino acid sequence SEQ ID NO: 489; or (j) the heavy chain comprises the amino acid sequence SEQ ID NO: 496 and the light chain comprises the amino acid sequence SEQ ID NO: 503.

[0020] In another embodiment, the method of treating a disease or condition amenable to therapy by depleting regulatory T cells (Tregs) and/or increasing effector T cell (Teff) response comprises administering to the subject an anti-ICOS antibody or antigen-binding fragment thereof comprising a heavy chain comprising a sequence having at least 95% sequence identity to SEQ ID NO: 410 and a light chain comprising a sequence having at least 95% sequence identity to SEQ ID NO: 417. In some embodiments, the heavy chain comprises the amino acid sequence SEQ ID NO: 410 and the light chain comprises the amino acid sequence SEQ ID NO: 417.

[0021] In another embodiment, the method comprises administering an anti-ICOS antibody that is a human IgG1 antibody.

[0022] In another embodiment, the method comprises administering KY1044.

[0023] In another embodiment, the method comprises administering the anti-ICOS antibody or antigen-binding fragment thereof (e.g., KY1044) to the subject at a dose of about 0.5 mg to about 10 mg. In some embodiments, the method comprises administering the anti-ICOS antibody or antigen-binding fragment thereof (e.g., KY1044) to the subject at a dose of about 0.8 mg to about 8 mg. In some embodiments, the method comprises administering the anti-ICOS antibody or antigen-binding fragment thereof (e.g., KY1044) to the subject at a dose of less than about 8 mg (e.g., at a dose of 7.5 mg or less, at a dose of 7 mg or less). In some embodiments, the method comprises administering the anti-ICOS antibody or antigen-binding fragment thereof (e.g., KY1044) to the subject at a dose of about 0.8 mg to about 2.4 mg. In some embodiments, the method comprises administering the anti-ICOS antibody or antigen-binding fragment thereof (e.g., KY1044) to the subject at a dose of about 2.4 mg to about 8 mg.

[0024] In another embodiment, the method comprises administering the anti-ICOS antibody or antigen-binding fragment thereof (e.g., KY1044) to the subject at a dose of about 0.8 mg. In some embodiments, the method comprises administering the anti-ICOS antibody or antigen-binding fragment thereof (e.g., KY1044) to the subject at a dose of about 2.4 mg. In some embodiments, the method comprises administering the anti-ICOS antibody or antigen-binding fragment thereof (e.g., KY1044) to the subject at a dose of about 8 mg.

[0025] In another embodiment, the anti-ICOS antibody or antigen-binding fragment thereof (e.g., KY1044) is administered to the subject every 2-6 weeks, e.g., every 2 weeks, every 3 weeks, every 4 weeks, every 5 weeks, or every 6 weeks. In some embodiments, the anti-ICOS antibody or antigen-binding fragment thereof (e.g., KY1044) is administered every 3 weeks. In some embodiment the anti-ICOS antibody or antigen-binding fragment thereof (e.g., KY1044) is administered every 6 weeks. In some embodiment the anti-ICOS antibody or antigen-binding fragment thereof (e.g., KY1044) is administered monthly.

[0026] In another embodiment, the anti-ICOS antibody or antigen-binding fragment thereof (e.g., KY1044) is administered once. In some embodiments, the anti-ICOS antibody or antigen-binding fragment thereof (e.g., KY1044) is administered more than once. In some embodiments, the anti-ICOS antibody or antigen-binding fragment thereof (e.g., KY1044) is administered for at least 6 months, e.g., for 6 months, 12 months, or more than 12 months.

[0027] In another embodiment, the anti-ICOS antibody or antigen-binding fragment thereof (e.g., KY1044) is administered as a monotherapy. In some embodiments, the anti-ICOS antibody or antigen-binding fragment thereof (e.g., KY1044) is administered in a combination therapy. For instance, in some embodiments the method of treating a disease or condition amenable to therapy by depleting regulatory T cells (Tregs) and/or increasing effector T cell (Teff) response further comprises administering to the subject a second therapeutic agent.

[0028] In another embodiment, the second therapeutic comprises an anti-PD-L1 antibody or antigen-binding fragment thereof. In some embodiments, the anti-PD-L1 antibody is atezolizumab. In some embodiments, the anti-PD-L1 antibody or antigen-binding fragment thereof (e.g., atezolizumab) is administered to the subject at a dose of about 1200 mg.

[0029] In another embodiment, the anti-PD-L1 antibody or antigen-binding fragment thereof (e.g., atezolizumab) is administered to the subject every 2-6 weeks, e.g., every 2 weeks, every 3 weeks, every 4 weeks, every 5 weeks, or every 6 weeks. In some embodiments, the anti-PD-L1 antibody or antigen-binding fragment thereof (e.g., atezolizumab) is administered every 3 weeks. In some embodiments, the anti-PD-L1 antibody or antigen-binding fragment thereof (e.g., atezolizumab) is administered every 6 weeks. In some embodiments, the anti-PD-L1 antibody or antigen-binding fragment thereof (e.g., atezolizumab) is administered monthly.

[0030] In another embodiment, the anti-PD-L1 antibody or antigen-binding fragment thereof (e.g., atezolizumab) is administered once. In some embodiments, the anti-PD-L1 antibody or antigen-binding fragment thereof (e.g., atezolizumab) is administered more than once. In some embodiments, the anti-PD-L1 antibody or antigen-binding fragment thereof (e.g., atezolizumab) is administered for at least 6 months, e.g., for 6 months, 12 months, or more than 12 months. In another embodiment, the anti-PD-L1 antibody or antigen-binding fragment thereof is co-administered to the subject with the anti-ICOS antibody or antigen-binding fragment thereof every 3 weeks.

[0031] In another embodiment, the anti-PD-L1 antibody or antigen-binding fragment thereof (e.g., atezolizumab) is administered to the subject in alternating doses with the anti-ICOS antibody or antigen-binding fragment thereof (e.g., KY1044), e.g., wherein the anti-PD-L1 antibody or antigen-binding fragment thereof is administered every 3 weeks and the anti-ICOS antibody or antigen-binding fragment thereof is administered every 6 weeks.

[0032] In another embodiment, the method comprises treating a tumour. In some embodiments, the method comprises treating a cancer. In some embodiments, the cancer comprises an advanced and/or metastatic cancer. In some embodiments, the cancer comprises triple negative breast cancer, head and neck squamous cell carcinoma, penile cancer, pancreatic cancer, non-small cell lung cancer, hepatocellular carcinoma, esophageal cancer, gastric cancer, melanoma, renal cell carcinoma, and/or cervical cancer.

[0033] Pharmaceutical compositions comprising the antibodies are also provided.

[0034] An ICOS knock out animal was used for generating cross-reactive antibodies. Notably, strong titres were obtained in ICOS knock out mice, and highly functional antibodies were isolated from among the antibody repertoire, including desirable cross-reactive antibodies. See WO 2018/029474 A2 (hereby incorporated by reference in its entirety).

[0035] Exemplary embodiments of the invention are set out in the drawings, the description below, and in the appended claims.

### 1.5. BRIEF DESCRIPTION OF THE DRAWINGS

[0036] Certain aspects and embodiments of the invention will now be described in more detail with reference to the accompanying drawings.

[0037] FIG. 1, FIG. 2, FIG. 3, FIG. 4: Graphs showing volumes of A20 tumours over time in mice for the study described in Example 1. Each treatment group is represented by a spider plot showing tumour size in individual animals, n=8 per group. For each group, the number of animals with no sign of tumour (indicating cured of disease) is indicated on the bottom left of the graph. Dosing was performed on days 8, 11, 15, 18, 22, 25 and 29 post tumour cell implantation and the dosing time is indicated by the grey shaded area. Compared with the control group (FIG. 1) and the anti-PD-L1 treatment group (FIG. 2), the STIM001 mIgG2a (FIG. 3) and STIM003 mIgG2a (FIG. 4) treatment groups showed significant inhibition of A20 tumour growth.

[0038] FIG. 5: STIM002 VH (top) and VL (bottom) domain amino acid sequences, showing residues that differ in the corresponding sequences of STIM001, STIM002B and related antibodies CL-61091, CL-64536, CL-64837, CL-64841 and CL-64912 and/or in the human germline. Sequence numbering is according to IMGT.

[0039] FIG. 6: STIM003 VH (top) and VL (bottom) domain amino acid sequences, showing residues that differ in the corresponding sequences of related antibodies CL-71642 and CL-74570 and/or in the human germline. Sequence numbering is according to IMGT. The VL domain of antibody CL-71642 obtained from sequencing is shown here without the N terminal residue. From the alignment it can be seen that the full VH domain sequence would comprise an N terminal glutamic acid.

[0040] FIG. 7: STIM007 VH (top) and VL (bottom) domain amino acid sequences, showing residues that differ in the corresponding sequences of STIM008 and/or in the human germline. Sequence numbering is according to IMGT.

[0041] FIG. 8: Effect of STIM003 (anti-ICOS) and AbW (anti-PD-L1) mIgG2a antibodies in the J558 syngeneic model. Each treatment group is represented by a “spider plot” showing the tumour size of individual animals (n=10 or n=8 per group). STIM003 monotherapy demonstrated some efficacy with 3 of 8 animals cured from their disease. Similarly anti-PDL1 was effective in this model with 6 out of 8 animals cured from their disease by day 37. When combined with anti-PDL1 antibodies, STIM003 mIgG2 fully inhibited tumour growth and improved the survival of treated animals. For each group, the number of animals cured of their disease is indicated on the bottom right of the respective graph. Dosing days are indicated by dotted lines (day 11, 15, 18, 22, 25 and 29).

[0042] FIG. 9: Quantification of ICOS expression (percentage of positive cells and relative expression/dMFI) on the different TILS cell subtypes in the tumour tissue. (A) The % of immune cell subtypes that are positive for ICOS expression and (B) the ICOS dMFI (relative ICOS expression on ICOS positive cell) of immune cell subtypes of animals treated with saline or anti-PD-L1 or anti-PD-1 surrogate antibodies. The mice were implanted with 100 μl of 1×10⁶ viable cells/ml on day 0 (n=7 or n=8). The animals were dosed i.p with 130 ug of antibody on day 13 and day 15. The tissue samples were isolated and analysed on day 16. CD4+/FOXP3+ cells were only included for the TReg population (right end side graphs) and were excluded from the “effector” CD4 cells (left end side graphs) which are all Foxp3 negative. See Example 3.

[0043] FIG. 10: Data from A20 in vivo efficacy study. Each treatment group is represented by a “spider plot” showing the tumour size of individual animals (n=10 per group). For each group, the number of animals cured of their disease is indicated on the respective graph. For the multiple dose, dosing was on days 8, 11, 15, 18, 22 and 25, indicated by dotted lines. For the single dose, animals received injection IP only on day 8. (A) Saline; (B) STIM003 mIgG2a multiple dose; (C) STIM003 mIgG2a single dose. See Example 4.

[0044] FIG. 11: Kaplan-Meier curves for study reported in Example 4 with STIM003 mIgG2a 60 μg fixed dose. SD=single dose, day 8. MD=multiple doses BIW from day 8.

[0045] FIG. 12: ICOS expression on major T cells subsets (T-reg [CD4+/FoxP3+], CD4 Eff [CD4+/FoxP3-]cells and CD8+) from CT26 tumour bearing animals (n=4 per time point) dosed with saline. Immune cells phenotyping were conducted on day 1, 2, 3, 4 and 8 post treatment and stained for ICOS expression in all the tissues at all time points. A-D showing the percentage of ICOS positive cells at all the time points in four different tissues. E-H show the ICOS dMFI (relative expression) all the time points in all the four different tissues. See Example 5.

[0046] FIG. 13: FACS analysis demonstrating T-reg depletion in the TME in response to STIM003 mIgG2a antibody. CT-26 tumour bearing animals were treated with a single dose (6, 60 or 200 μg) of STIM003 on day 12 post tumour cell implantation. Tissues (n=4 per time point) where harvested for FACS analysis on day 1, 2, 3, 4 and 8 post treatment. The percentage of T-reg cells (CD4⁺CD25⁺Foxp3⁺) in total tumour (A) and the percentage of T-reg cells in the blood (B) are shown at the different time points. See Example 5.

[0047] FIG. 14: Increase in CD8:T-reg and CD4 eff:T-reg ratio in response to STIM003 mIgG2a. CT-26 tumour bearing animals received a single dose (6, 60 or 200 μg) of STIM003 mIgG2a on day 12 post tumour cell implantation. Tissues (n=4 per time point) were harvested for FACS analysis on day 1, 2, 3, 4 and 8 post treatment and T eff to T-reg ratios were calculated. (A) & (B), CD8:T-reg ratio in tumour and blood, (C) & (D) CD4-eff:T-reg ratio in tumour and blood. See Example 5.

[0048] FIG. 15: STIM003 treatment correlates with increased degranulation and Th1 cytokine production by TILs. On day 8 post treatment TILs were isolated and FACS analysis were performed to detect CD107a expression on CD4 and CD8 T cells (A-B). In parallel, cells from dissociated tumours were rested for 4 hrs in the presence of Brefeldin-A, cells were stained for T cells markers and permeabilised for intracellular staining to detect IFN-γ and TNF-α (C—H). See Example 5.

[0049] FIG. 16A: Evidence of KY1044 target engagement on ICOS positive CD4 memory cells (defined as ICOS+CD3+CD4+FoxP3-CD45RA−). Y-axis measures percentage occupancy on the CD4 memory cells as a function of sample collection date. Blood samples were collected on cycle 1 day 1 (C1D1), cycle 1 day 8 (C1D8), cycle 2 day 1 (C2D1) and cycle 2 day 8 (C2D8). Dose level 1=0.8 mg. Dose level 2=2.4 mg. Lines connect data points for the same patient.

[0050] FIG. 16B: Evidence of KY1044 target engagement on ICOS positive CD4 memory cells (defined as ICOS+CD3+CD4+FoxP3-CD45RA−). Y-axis measures percentage occupancy on the CD4 memory cells as a function of sample collection date. Blood samples were collected on cycle 1 day 1 (C1D1), cycle 1 day 8 (C1D8), cycle 2 day 1 (C2D1) and cycle 2 day 8 (C2D8). Dose level 3=8 mg. Dose level 4=24 mg. Dose level 5=80 mg. Dose level 6=240 mg. Lines connect data points for the same patient.

[0051] FIG. 17A: KY1044-dependent agonism assessed by measuring circulating cytokine levels. Solid line plot represents mean, shaded area represents 95% confidence interval of the ratio between visits and baseline measurements of GM-CSF for patients treated with KY1044. Light grey data points are from patients (n=27) receiving the lower KY1044 dose levels (0.8 mg and 2.4 mg), which resulted in incomplete receptor occupancy. Dark grey data points are from patients (n=14) receiving the higher KY1044 dose levels (8 mg or above), which resulted in complete receptor occupancy.

[0052] FIG. 17B: KY1044-dependent agonism assessed by measuring circulating cytokine levels. Solid line plot represents mean, shaded area represents 95% confidence interval of the ratio between visits and baseline measurements of TNFα for patients treated with KY1044. Light grey data points are from patients (n=27) receiving the lower KY1044 dose levels (0.8 mg and 2.4 mg), which resulted in incomplete receptor occupancy. Dark grey data points are from patients (n=14) receiving the higher KY1044 dose levels (8 mg or above), which resulted in complete receptor occupancy.

[0053] FIG. 18A: Interim results of phase I/II clinical trial regarding treatment duration. Median duration of treatment for all enrolled patients was 9 weeks.

[0054] FIG. 18B: Interim results of phase I/II clinical trial, showing treatment duration in relation to the therapy regimen and partial or complete receptor occupancy.

[0055] FIG. 18C: Interim results of phase I/II clinical trial, showing treatment duration in relation to ICOS receptor occupancy.

### 1.6. DETAILED DESCRIPTION

[0056] 1.6.1. ICOS

[0057] Antibodies according to the present invention bind the extracellular domain of human ICOS. Thus, the antibodies bind ICOS-expressing T lymphocytes. “ICOS” or “the ICOS receptor” referred to herein may be human ICOS, unless the context dictates otherwise. Sequences of human, cynomolgus and mouse ICOS are shown in the appended sequence listing, and are available from NCBI as human NCBI ID: NP_036224.1, mouse NCBI ID: NP_059508.2 and cynomolgus GenBank ID: EHH55098.1.

[0058] 1.6.2. Cross-Reactivity

[0059] Antibodies according to the present invention are preferably cross-reactive, and may for example bind the extracellular domain of mouse ICOS as well as human ICOS. The antibodies may bind other non-human ICOS, including ICOS of primates such as cynomolgus. An anti-ICOS antibody intended for therapeutic use in humans must bind human ICOS, whereas binding to ICOS of other species would not have direct therapeutic relevance in the human clinical context. Nevertheless, the data herein indicate that antibodies that bind both human and mouse ICOS have properties that render them particularly suitable as agonist and depleting molecules. This may result from one or more particular epitopes being targeted by the cross-reactive antibodies. Regardless of the underlying theory, however, cross-reactive antibodies are of high value and are excellent candidates as therapeutic molecules for pre-clinical and clinical studies.

[0060] As explained in the experimental Examples, the STIM antibodies described here were generated using Kymouse™ technology where the mouse had been engineered to lack expression of mouse ICOS (an ICOS knock-out). ICOS knock-out transgenic animals and their use for generating cross-reactive antibodies are further aspects of the present invention.

[0061] One way to quantify the extent of species cross-reactivity of an antibody is as the fold-difference in its affinity for antigen or one species compared with antigen of another species, e.g., fold difference in affinity for human ICOS vs mouse ICOS. Affinity may be quantified as K_{D}, referring to the equilibrium dissociation constant of the antibody-antigen reaction as determined by SPR with the antibody in Fab format as described elsewhere herein. A species cross-reactive anti-ICOS antibody may have a fold-difference in affinity for binding human and mouse ICOS that is 30-fold or less, 25-fold or less, 20-fold or less, 15-fold or less, 10-fold or less or 5-fold or less. To put it another way, the K_{D} of binding the extracellular domain of human ICOS may be within 30-fold, 25-fold, 20-fold, 15-fold, 10-fold or 5-fold of the K_{D} of binding the extracellular domain of mouse ICOS. Antibodies can also be considered cross-reactive if the K_{D} for binding antigen of both species meets a threshold value, e.g., if the K_{D} of binding human ICOS and the K_{D} of binding mouse ICOS are both 10 mM or less, preferably 5 mM or less, more preferably 1 mM or less. The K_{D} may be 10 nM or less, 5 nM or less, 2 nM or less, or 1 nM or less. The K_{D} may be 0.9 nM or less, 0.8 nM or less, 0.7 nM or less, 0.6 nM or less, 0.5 nM or less, 0.4 nM or less, 0.3 nM or less, 0.2 nM or less, or 0.1 nM or less.

[0062] An alternative measure of cross-reactivity for binding human ICOS and mouse ICOS is the ability of an antibody to neutralise ICOS ligand binding to ICOS receptor, such as in an HTRF assay (see Example 8 of U.S. Pat. No. 9,957,323). Examples of species cross-reactive antibodies are provided herein, including STIM001, STIM002, STIM002-B, STIM003, STIM005 and STIM006, each of which was confirmed as neutralising binding of human B7-H2 (ICOS ligand) to human ICOS and neutralising binding of mouse B7-H2 to mouse ICOS in an HTRF assay. Any of these antibodies or their variants may be selected when an antibody cross-reactive for human and mouse ICOS is desired. A species cross-reactive anti-ICOS antibody may have an IC50 for inhibiting binding of human ICOS to human ICOS receptor that is within 25-fold, 20-fold, 15-fold, 10-fold or 5-fold of the IC50 for inhibiting mouse ICOS to mouse ICOS receptor as determined in an HTRF assay. Antibodies can also be considered cross-reactive if the IC50 for inhibiting binding of human ICOS to human ICOS receptor and the IC50 for inhibiting binding of mouse ICOS to mouse ICOS receptor are both 1 mM or less, preferably 0.5 mM or less, e.g., 30 nM or less, 20 nM or less, 10 nM or less. The IC50s may be 5 nM or less, 4 nM or less, 3 nM or less or 2 nM or less. In some cases the IC50s will be at least 0.1 nM, at least 0.5 nM or at least 1 nM.

[0063] 1.6.3. Specificity

[0064] Antibodies according to the present invention are preferably specific for ICOS. That is, the antibody binds its epitope on the target protein, ICOS (human ICOS, and preferably mouse and/or cynomolgus ICOS as noted above), but does not show significant binding to molecules that do not present that epitope, including other molecules in the CD28 gene family. An antibody according to the present invention preferably does not bind human CD28. The antibody preferably also does not bind mouse or cynomolgus CD28.

[0065] CD28 co-stimulates T cell responses when engaged by its ligands CD80 and CD86 on professional antigen presenting cells in the context of antigen recognition via the TCR. For various in vivo uses of the antibodies described herein, the avoidance of binding to CD28 is considered advantageous. Non-binding of the anti-ICOS antibody to CD28 should allow CD28 to interact with its native ligands and to generate appropriate co-stimulatory signal for T cell activation. Additionally, non-binding of the anti-ICOS antibody to CD28 avoids the risk of superagonism. Over-stimulation of CD28 can induce proliferation in resting T cells without the normal requirement for recognition of a cognate antigen via the TCR, potentially leading to runaway activation of T cells and consequent cytokine-release syndrome, especially in human subjects. The non-recognition of CD28 by antibodies according to the present invention therefore represents an advantage in terms of their safe clinical use in humans.

[0066] As discussed elsewhere herein, the present invention extends to multispecific antibodies (e.g., bispecifics). A multispecific (e.g., bispecific) antibody may comprise (i) an antibody antigen binding site for ICOS and (ii) a further antigen binding site (optionally an antibody antigen binding site, as described herein) which recognises another antigen (e.g., PD-L1). Specific binding of individual antigen binding sites may be determined. Thus, antibodies that specifically bind ICOS include antibodies comprising an antigen binding site that specifically binds ICOS, wherein optionally the antigen binding site for ICOS is comprised within an antigen-binding molecule that further includes one or more additional binding sites for one or more other antigens, e.g., a bispecific antibody that binds ICOS and PD-L1.

[0067] 1.6.4. Affinity

[0068] The affinity of binding of an antibody to ICOS may be determined. Affinity of an antibody for its antigen may be quantified in terms of the equilibrium dissociation constant K_{D}, the ratio Ka/Kd of the association or on-rate (Ka) and the dissociation or off-rate (kd) of the antibody-antigen interaction. Kd, Ka and Kd for antibody-antigen binding can be measured using surface plasmon resonance (SPR).

[0069] An antibody according to the present invention may bind the EC domain of human ICOS with a K_{D} of 10 mM or less, preferably 5 mM or less, more preferably 1 mM or less. The K_{D} may be 50 nM or less, 10 nM or less, 5 nM or less, 2 nM or less, or 1 nM or less. The K_{D} may be 0.9 nM or less, 0.8 nM or less, 0.7 nM or less, 0.6 nM or less, 0.5 nM or less, 0.4 nM or less, 0.3 nM or less, 0.2 nM or less, or 0.1 nM or less. The K_{D} may be at least 0.001 nM, for example at least 0.01 nM or at least 0.1 nM.

[0070] Quantification of affinity may be performed using SPR with the antibody in Fab format. A suitable protocol is as follows:

1. Coupling anti-human (or other antibody constant region species-matched) IgG to a biosensor chip (e.g., GLM chip) such as by primary amine coupling;
2. Exposing the anti-human IgG (or other matched species antibody) to a test antibody, e.g., in Fab format, to capture test antibody on the chip;
3. Passing the test antigen over the chip's capture surface at a range of concentrations, e.g., at 5000 nM, 1000 nM, 200 nM, 40 nM, 8 nM and 2 nM, and at 0 nM (i.e., buffer alone); and
4. Determining the affinity of binding of test antibody to test antigen using SPR at 25° C. Buffer may be at pH 7.6, 150 mM NaCl, 0.05% detergent (e.g., P20) and 3 mM EDTA. Buffer may optionally contain 10 mM HEPES. HBS-EP can be used as running buffer. HBS-EP is available from Teknova Inc (California; catalogue number H8022).

[0071] Regeneration of the capture surface can be carried out with 10 mM glycine at pH 1.7. This removes the captured antibody and allows the surface to be used for another interaction. The binding data can be fitted to 1:1 model inherent using standard techniques, e.g., using a model inherent to the ProteOn XPR36™ analysis software.

[0072] A variety of SPR instruments are known, such as Biacore™, ProteOn XPR36™ (Bio-Rad®), and KinExA® (Sapidyne Instruments, Inc).

[0073] As described, affinity may be determined by SPR with the antibody in Fab format, with the antigen coupled to the chip surface and the test antibody passed over the chip in Fab format in solution, to determine affinity of the monomeric antibody-antigen interaction. Affinity can be determined at any desired pH, e.g., pH 5.5 or pH 7.6, and any desired temperature e.g., 25° C. or 37° C.

[0074] Other ways to measure binding of an antibody to ICOS include fluorescence activated cell sorting (FACS), e.g., using cells (e.g., CHO cells) with exogenous surface expression of ICOS or activated primary T cells expressing endogenous levels of ICOS. Antibody binding to ICOS-expressing cells as measured by FACS indicates that the antibody is able to bind the extracellular (EC) domain of ICOS.

[0075] 1.6.5. ICOS Receptor Agonism

[0076] The ICOS ligand (ICOSL, also known as B7-H2) is a cell surface expressed molecule that binds to the ICOS receptor [17]. This intercellular ligand-receptor interaction promotes multimerisation of ICOS on the T cell surface, activating the receptor and stimulating downstream signalling in the T cell. In effector T cells, this receptor activation stimulates the effector T cell response.

[0077] Anti-ICOS antibodies may act as agonists of ICOS, mimicking and even surpassing this stimulatory effect of the native ICOS ligand on the receptor. Such agonism may result from ability of the antibody to promote multimerisation of ICOS on the T cell. One mechanism for this is where the antibodies form intercellular bridges between ICOS on the T cell surface and receptors on an adjacent cell (e.g., B cell, antigen-presenting cell, or other immune cell), such as Fc receptors. Another mechanism is where antibodies having multiple (e.g., two) antigen-binding sites (e.g., two VH-VL domain pairs) bridge multiple ICOS receptor molecules and so promote multimerisation. A combination of these mechanisms may occur.

[0078] Agonism can be tested for in in vitro T cell activation assays, using antibody in soluble form (e.g., in immunoglobulin format or other antibody format comprising two spatially separated antigen-binding sites, e.g., two VH-VL pairs), either including or excluding a cross-linking agent, or using antibody bound to a solid surface to provide a tethered array of antigen-binding sites. Agonism assays may use a human ICOS positive T lymphocyte cell line such as MJ cells (ATCC CRL-8294) as the target T cell for activation in such assays. One or more measures of T cell activation can be determined for a test antibody and compared with a reference molecule or a negative control to determine whether there is a statistically significant (p<0.05) difference in T cell activation effected by the test antibody compared with the reference molecule or the control. One suitable measure of T cell activation is production of cytokines, e.g., IFNγ, TNFα or IL-2. The skilled person will include suitable controls as appropriate, standardising assay conditions between test antibody and control. A suitable negative control is an antibody in the same format (e.g., isotype control) that does not bind ICOS, e.g., an antibody specific for an antigen that is not present in the assay system. A significant difference is observed for test antibody relative to a cognate isotype control within the dynamic range of the assay is indicative that the antibody acts as an agonist of the ICOS receptor in that assay.

[0079] An agonist antibody may be defined as one which, when tested in a T cell activation assay:

[0080] has a significantly lower EC50 for induction of IFNγ production compared with control antibody;

[0081] induces significantly higher maximal IFNγ production compared with control antibody;

[0082] has a significantly lower EC50 for induction of IFNγ production compared with ICOSL-Fc;

[0083] induces significantly higher maximal IFNγ production compared with ICOSL-Fc;

[0084] has a significantly lower EC50 for induction of IFNγ production compared with reference antibody C398.4A; and/or

[0085] induces significantly higher maximal IFNγ production compared with reference antibody C398.4A.

[0086] Exemplary in vitro T cell assays include the bead-bound assay, the plate-bound assay, and the soluble form assay, as disclosed in Examples 13-15 of U.S. Pat. No. 9,957,323.

[0087] A significantly lower or significantly higher value may for example be up to 0.5-fold different, up to 0.75-fold different, up to 2-fold different, up to 3-fold different, up to 4-fold different or up to 5-fold different, compared with the reference or control value.

[0088] Thus, in one example, an antibody according to the present invention has a significantly lower, e.g., at least 2-fold lower, EC50 for induction of IFNγ in an MJ cell activation assay using the antibody in bead-bound format, compared with control.

[0089] The bead-bound assay uses the antibody (and, for control or reference experiments, the control antibody, reference antibody or ICOSL-Fc) bound to the surface of beads. Magnetic beads may be used, and various kinds are commercially available, e.g., Tosyl-activated DYNABEADS M-450 (DYNAL Inc, 5 Delaware Drive, Lake Success, N.Y. 11042 Prod No. 140.03, 140.04). Beads may be coated, or generally by dissolving the coating material in carbonate buffer (pH 9.6, 0.2 M) or other method known in the art. Use of beads conveniently allows the quantity of protein bound to the bead surface to be determined with a good degree of accuracy. Standard Fc-protein quantification methods can be used for coupled protein quantification on beads. Any suitable method can be used, with reference to a relevant standard within the dynamic range of the assay, including DELFIA, ELISA, or other methods.

[0090] Agonism activity of an antibody can also be measured in primary human T lymphocytes ex vivo. The ability of an antibody to induce expression of IFNγ in such T cells is indicative of ICOS agonism. Preferably, an antibody will show significant (p<0.05) induction of IFNγ at 5 μg/ml compared with control antibody in T cell activation assay 1 and/or T cell activation assay 2. As noted above, an anti-ICOS antibody may stimulate T cell activation to a greater degree than ICOS-L or C398.4 in such an assay. Thus, the antibody may show significantly (p<0.05) greater induction of IFNγ at 5 μg/ml compared with the control or reference antibody in T cell activation assay 1 or 2. TNFα or IL-2 induction may be measured as an alternative assay readout.

[0091] Agonism of an anti-ICOS antibody may contribute to its ability to change the balance between populations of TReg and TEff cells in vivo, e.g., in a site of pathology such as a tumour microenvironment, in favour of TEff cells. The ability of an antibody to enhance tumour cell killing by activated ICOS-positive effector T cells may be determined, as discussed elsewhere herein.

### ICOS Receptor Agonism and Therapeutic Efficacy at Lower Doses

[0092] The present invention is based in part on the discovery that a lower anti-ICOS antibody concentration, resulting from administration of a lower dose to subjects, may improve clinical efficacy compared with a higher anti-ICOS concentration resulting from a higher dose. Surprisingly, as indicated by data presented herein, an anti-ICOS antibody dose that only results in partial receptor/transient occupancy may induce a stronger GM-CSF and TNFα signal after treatment, compared with an anti-ICOS antibody dose that results in full receptor occupancy.

[0093] Without being limited by theory, anti-ICOS antibodies such as KY1044 may act as agonists of ICOS by promoting multimerization of ICOS on the T cell. ICOS receptors have a propensity to configure as homodimers. Thus, antibodies having multiple antigen-binding sites to ICOS can bridge multiple ICOS receptor molecules and result in ligand-induced clustering or multimerization. Such ligand bridging is proposed to mediate the avidity effect through increased stability of ligand-receptor interactions.

[0094] The multimerization of the ICOS receptor may be dependent in part on the stoichiometric ratio of the antibody concentration and the receptors. For instance, without being limited by theory, if the concentration of antibody is significantly greater than the number of available receptors, then this would favour the formation of isolated receptors bound to two different antibodies and reduce FcγR-dependent stimulation, but if the number of receptors greatly exceeds the number of antibodies present, then ligand bridging would be unlikely to occur and subsequently also lead to reduced FcγR-dependent stimulation. In some embodiments, equal concentration of antibody and receptor are present and promote the formation of multimeric complexes and maximally induce FcγR-dependent stimulation, resulting in a greater release of pro-inflammatory cytokines. Also without being limited by theory, high anti-ICOS antibody opsonization may result in no clustering and/or poor immunological synapse and no co-stimulation, while low anti-ICOS antibody opsonization may improve clustering, resulting in FcγR-dependent co-stimulation.

[0095] In some embodiments, the anti-ICOS antibody that is administered in a dose effective to yield partial ICOS receptor/transient occupancy, improve clustering, and/or improve co-stimulation comprises the CDRs of KY1044. In another embodiment, the anti-ICOS antibody comprises heavy and light chain variable domains having at least 85%, 90%, or 95% sequence identity to the heavy and light chain variable domains of KY1044. In some such embodiments, the heavy and light chain variable domains having at least 85%, 90%, or 95% sequence identity to the heavy and light chain variable domains of KY1044 comprise the CDRs of KY1044. In another embodiment, the anti-ICOS antibody comprises the heavy and light chain variable domains of KY1044. In some embodiments, an anti-ICOS antibody dose of about 8 mg yields full ICOS receptor occupancy. Thus, in some embodiments, the anti-ICOS antibody dose effective to yield partial ICOS receptor/transient occupancy, improve clustering, and/or improve co-stimulation is less than about 8 mg, e.g., is about 7 mg, about 6 mg, about 5 mg, about 4 mg, about 3 mg, about 2 mg, about 1 mg, or less than about 1 mg. In one embodiment, the dose of the anti-ICOS antibody is about 2.4 mg. In another embodiment, the dose of the anti-ICOS antibody is about 0.8 mg.

[0096] In another embodiment, the anti-ICOS antibody that is administered in a dose effective to yield partial ICOS receptor/transient occupancy, improve clustering, and/or improve co-stimulation comprises heavy and light chains having at least 85%, 90%, or 95% sequence identity to the heavy and light chains of KY1044. In some such embodiments, the heavy and light chains having at least 85%, 90%, or 95% sequence identity to the heavy and light chains of KY1044 comprise the CDRs of KY1044. In another embodiment, the anti-ICOS antibody comprises the heavy and light chains of KY1044. In another embodiment, the anti-ICOS antibody is KY1044. In some embodiments, an anti-ICOS antibody dose of about 8 mg yields full ICOS receptor occupancy. Thus, in some embodiments, the anti-ICOS antibody dose effective to yield partial ICOS receptor/transient occupancy, improve clustering, and/or improve co-stimulation is less than about 8 mg, e.g., is about 7 mg, about 6 mg, about 5 mg, about 4 mg, about 3 mg, about 2 mg, about 1 mg, or less than about 1 mg. In one embodiment, the dose of the anti-ICOS antibody is about 2.4 mg. In another embodiment, the dose of the anti-ICOS antibody is about 0.8 mg.

[0097] In some embodiments, intratumoural ICOS+ Treg depletion (decrease in ICOS+FOXP3+ cells) is highest at about 8 mg of the anti-ICOS antibody (e.g., KY1044). In some embodiments, the improvement of the CD8/ICOS+FOXP3+ Treg ratio in the tumour microenvironment yielded by the anti-ICOS antibody plateaus at doses of about 8 mg or higher of the anti-ICOS antibody (e.g., KY1044).

[0098] In some embodiments, ICOS agonism is most evident at a dose of an anti-ICOS antibody (e.g., KY1044) lower than about 8 mg. In some embodiments, the agonistic activity of the anti-ICOS antibody (e.g., KY1044) is effective at about 2.4-8 mg. In some embodiments, the agonistic activity of the anti-ICOS antibody (e.g., KY1044) is effective at about 0.8-2.4 mg. In some embodiments, the agonistic activity of the anti-ICOS antibody (e.g., KY1044) is effective at about 2.4 mg. In other embodiments, the agonistic activity of the anti-ICOS antibody (e.g., KY1044) is effective at about 0.8 mg.

[0099] 1.6.6. T Cell Dependent Killing

[0100] Effector T cell function can be determined in a biologically relevant context using an in vitro co-culture assay where tumour cells are incubated with relevant immune cells to trigger immune cell-dependent killing, in which the effect of an anti-ICOS antibody on tumour cell killing by TEffs is observed.

[0101] The ability of an antibody to enhance tumour cell killing by activated ICOS-positive effector T cells may be determined. An anti-ICOS antibody may stimulate significantly greater (p<0.05) tumour cell killing compared with a control antibody. An anti-ICOS antibody may stimulate similar or greater tumour cell killing in such an assay as compared with a reference molecule such as the ICOS ligand or the C398.4 antibody. A similar degree of tumour cell killing can be represented as the assay readout for the test antibody being less than two-fold different from that for the reference molecule.

[0102] 1.6.7. ICOS Ligand-Receptor Neutralisation Potency

[0103] An antibody according to the present invention may be one which inhibits binding of ICOS to its ligand ICOSL.

[0104] The degree to which an antibody inhibits binding of the ICOS receptor to its ligand is referred to as its ligand-receptor neutralising potency. Potency is normally expressed as an IC50 value, in pM unless otherwise stated. In ligand-binding studies, IC50 is the concentration that reduces receptor binding by 50% of maximal specific binding level. IC50 may be calculated by plotting % specific receptor binding as a function of the log of the antibody concentration, and using a software program such as Prism (GraphPad) to fit a sigmoidal function to the data to generate IC50 values. Neutralising potency may be determined in an HTRF assay, as disclosed in Example 8 of U.S. Pat. No. 9,957,323.

[0105] An IC50 value may represent the mean of a plurality of measurements. Thus, for example, IC50 values may be obtained from the results of triplicate experiments, and a mean IC50 value can then be calculated.

[0106] An antibody may have an IC50 of 1 mM or less in a ligand-receptor neutralisation assay, e.g., 0.5 mM or less. The IC50 may be, 30 nM or less, 20 nM or less, 10 nM or less, 5 nM or less, 4 nM or less, 3 nM or less or 2 nM or less. The IC50 may be at least 0.1 nM, at least 0.5 nM or at least 1 nM.

### 1.6.8. Antibodies

[0107] As described in the Examples of U.S. Pat. No. 9,957,323, we isolated and characterised antibodies of particular interest, designated STIM001, STIM002, STIM002-B, STIM003, STIM004, STIM005, STIM006, STIM007, STIM008 and STIM009. In various aspects of the invention, unless context dictates otherwise, antibodies may be selected from any of these antibodies, or from the sub-set of STIM001, STIM002, STIM003, STIM004 and STIM005. Sequences of each of these antibodies are provided in the appended sequence listing, wherein for each antibody the following sequences are shown: nucleotide sequence encoding VH domain; amino acid sequence of VH domain; VH CDR1 amino acid sequence, VH CDR2 amino acid sequence; VH CDR3 amino acid sequence; nucleotide sequence encoding V_{L} domain; amino acid sequence of V_{L} domain; VL CDR1 amino acid sequence; VL CDR2 amino acid sequence; and VL CDR3 amino acid sequence, respectively. The present invention encompasses anti-ICOS antibodies having the VH and/or V_{L} domain sequences of all antibodies shown in the appended sequence listing and/or in the drawings, as well as antibodies comprising the HCDRs and/or LCDRs of those antibodies, and optionally having the full heavy chain and/or full light chain amino acid sequence.

[0108] STIM001 has a heavy chain variable region (V_{H}) amino acid sequence of Seq ID No:366, comprising the CDRH1 amino acid sequence of Seq ID No:363, the CDRH2 amino acid sequence of Seq ID No:364, and the CDRH3 amino acid sequence of Seq ID No:365. The heavy chain nucleic acid sequence of the V_{H} domain is Seq ID No:367. STIM001 has a light chain variable region (V_{L}) amino acid sequence of Seq ID No:373, comprising the CDRL1 amino acid sequence of Seq ID No:370, the CDRL2 amino acid sequence of Seq ID No:371, and the CDRL3 amino acid sequence of Seq ID No:372. The light chain nucleic acid sequence of the V_{L} domain is Seq ID No:374. The V_{H} domain may be combined with any of the heavy chain constant region sequences described herein, e.g. Seq ID No:193, Seq ID No:195, Seq ID No:197, Seq ID No:199, Seq ID No:201, Seq ID No:203, Seq ID No:205, Seq ID No:340, Seq ID No:524, Seq ID No:526, Seq ID No:528, Seq ID No:530, Seq ID No:532 or Seq ID No:534. The V_{L} domain may be combined with any of the light chain constant region sequences described herein, e.g. Seq ID Nos:207, 209, 211, 213, 215, 217, 219, 221, 223, 225, 227, 229, 231, 233, 235, 237, 536 and 538. A full length heavy chain amino acid sequence is Seq ID No:368 (heavy chain nucleic acid sequence Seq ID No:369). A full length light chain amino acid sequence is Seq ID No:375 (light chain nucleic acid sequence Seq ID No:376).

[0109] STIM002 has a heavy chain variable region (V_{H}) amino acid sequence of Seq ID No:380, comprising the CDRH1 amino acid sequence of Seq ID No:377, the CDRH2 amino acid sequence of Seq ID No:378, and the CDRH3 amino acid sequence of Seq ID No:379. The heavy chain nucleic acid sequence of the V_{H} domain is Seq ID No:381. STIM002 has a light chain variable region (V_{L}) amino acid sequence of Seq ID No:387, comprising the CDRL1 amino acid sequence of Seq ID No:384, the CDRL2 amino acid sequence of Seq ID No:385, and the CDRL3 amino acid sequence of Seq ID No:386. The light chain nucleic acid sequence of the V_{L} domain is Seq ID No:388 or Seq ID No:519. The V_{H} domain may be combined with any of the heavy chain constant region sequences described herein, e.g. Seq ID No:193, Seq ID No:195, Seq ID No:197, Seq ID No:199, Seq ID No:201, Seq ID No:203, Seq ID No:205, Seq ID No:340, Seq ID No:524, Seq ID No:526, Seq ID No:528, Seq ID No:530, Seq ID No:532 or Seq ID No:534. The V_{L} domain may be combined with any of the light chain constant region sequences described herein, e.g. Seq ID Nos:207, 209, 211, 213, 215, 217, 219, 221, 223, 225, 227, 229, 231, 233, 235, 237, 536 and 538. A full length heavy chain amino acid sequence is Seq ID No:382 (heavy chain nucleic acid sequence Seq ID No:383). A full length light chain amino acid sequence is Seq ID No:389 (light chain nucleic acid sequence Seq ID No:390 or Seq ID NO:520).

[0110] STIM002-B has a heavy chain variable region (V_{H}) amino acid sequence of Seq ID No:394, comprising the CDRH1 amino acid sequence of Seq ID No:391, the CDRH2 amino acid sequence of Seq ID No:392, and the CDRH3 amino acid sequence of Seq ID No:393. The heavy chain nucleic acid sequence of the V_{H} domain is Seq ID No:395. STIM002-B has a light chain variable region (V_{L}) amino acid sequence of Seq ID No:401, comprising the CDRL1 amino acid sequence of Seq ID No:398, the CDRL2 amino acid sequence of Seq ID No:399, and the CDRL3 amino acid sequence of Seq ID No:400. The light chain nucleic acid sequence of the V_{L} domain is Seq ID No:402. The V_{H} domain may be combined with any of the heavy chain constant region sequences described herein, e.g. Seq ID No:193, Seq ID No:195, Seq ID No:197, Seq ID No:199, Seq ID No:201, Seq ID No:203, Seq ID No:205, Seq ID No:340, Seq ID No:524, Seq ID No:526, Seq ID No:528, Seq ID No:530, Seq ID No:532 or Seq ID No:534. The V_{L} domain may be combined with any of the light chain constant region sequences described herein, e.g. Seq ID Nos:207, 209, 211, 213, 215, 217, 219, 221, 223, 225, 227, 229, 231, 233, 235, 237, 536 and 538. A full length heavy chain amino acid sequence is Seq ID No:396 (heavy chain nucleic acid sequence Seq ID No:397). A full length light chain amino acid sequence is Seq ID No:403 (light chain nucleic acid sequence Seq ID No:404).

[0111] STIM003, interchangeably referred to herein as KY1044, has a heavy chain variable region (V_{H}) amino acid sequence of Seq ID No:408, comprising the CDRH1 amino acid sequence of Seq ID No:405, the CDRH2 amino acid sequence of Seq ID No:406, and the CDRH3 amino acid sequence of Seq ID No:407. The heavy chain nucleic acid sequence of the V_{H} domain is Seq ID No:409 or Seq ID No:521. STIM003 has a light chain variable region (V_{L}) amino acid sequence of Seq ID No:415, comprising the CDRL1 amino acid sequence of Seq ID No:412, the CDRL2 amino acid sequence of Seq ID No:413, and the CDRL3 amino acid sequence of Seq ID No:414. The light chain nucleic acid sequence of the V_{L} domain is Seq ID No:4416. The V_{H} domain may be combined with any of the heavy chain constant region sequences described herein, e.g. Seq ID No:193, Seq ID No:195, Seq ID No:197, Seq ID No:199, Seq ID No:201, Seq ID No:203, Seq ID No:205, Seq ID No:340, Seq ID No:524, Seq ID No:526, Seq ID No:528, Seq ID No:530, Seq ID No:532 or Seq ID No:534. The V_{L} domain may be combined with any of the light chain constant region sequences described herein, e.g. Seq ID Nos:207, 209, 211, 213, 215, 217, 219, 221, 223, 225, 227, 229, 231, 233, 235, 237, 536 and 538. A full length heavy chain amino acid sequence is Seq ID No:410 (heavy chain nucleic acid sequence Seq ID No:411 or Seq ID No:522). A full length light chain amino acid sequence is Seq ID No:417 (light chain nucleic acid sequence Seq ID No:418).

[0112] STIM004 has a heavy chain variable region (V_{H}) amino acid sequence of Seq ID No:422, comprising the CDRH1 amino acid sequence of Seq ID No:419, the CDRH2 amino acid sequence of Seq ID No:420, and the CDRH3 amino acid sequence of Seq ID No:421. The heavy chain nucleic acid sequence of the V_{H} domain is Seq ID No:423. STIM004 has a light chain variable region (V_{L}) amino acid sequence of Seq ID No:429, comprising the CDRL1 amino acid sequence of Seq ID No:426, the CDRL2 amino acid sequence of Seq ID No:427, and the CDRL3 amino acid sequence of Seq ID No:428. The light chain nucleic acid sequence of the V_{L} domain is Seq ID No:430 or Seq ID No:431. The V_{H} domain may be combined with any of the heavy chain constant region sequences described herein, e.g. Seq ID No:193, Seq ID No:195, Seq ID No:197, Seq ID No:199, Seq ID No:201, Seq ID No:203, Seq ID No:205, Seq ID No:340, Seq ID No:524, Seq ID No:526, Seq ID No:528, Seq ID No:530, Seq ID No:532 or Seq ID No:534. The V_{L} domain may be combined with any of the light chain constant region sequences described herein, e.g. Seq ID Nos:207, 209, 211, 213, 215, 217, 219, 221, 223, 225, 227, 229, 231, 233, 235, 237, 536 and 538. A full length heavy chain amino acid sequence is Seq ID No:424 (heavy chain nucleic acid sequence Seq ID No:425). A full length light chain amino acid sequence is Seq ID No:432 (light chain nucleic acid sequence Seq ID No:433 or Seq ID no: 434).

[0113] STIM005 has a heavy chain variable region (V_{H}) amino acid sequence of Seq ID No:438, comprising the CDRH1 amino acid sequence of Seq ID No:435, the CDRH2 amino acid sequence of Seq ID No:436, and the CDRH3 amino acid sequence of Seq ID No:437. The heavy chain nucleic acid sequence of the V_{H} domain is Seq ID No:439. STIM005 has a light chain variable region (V_{L}) amino acid sequence of Seq ID No:445, comprising the CDRL1 amino acid sequence of Seq ID No:442, the CDRL2 amino acid sequence of Seq ID No:443, and the CDRL3 amino acid sequence of Seq ID No:444. The light chain nucleic acid sequence of the V_{L} domain is Seq ID No:446. The V_{H} domain may be combined with any of the heavy chain constant region sequences described herein, e.g. Seq ID No:193, Seq ID No:195, Seq ID No:197, Seq ID No:199, Seq ID No:201, Seq ID No:203, Seq ID No:205, Seq ID No:340, Seq ID No:524, Seq ID No:526, Seq ID No:528, Seq ID No:530, Seq ID No:532 or Seq ID No:534. The V_{L} domain may be combined with any of the light chain constant region sequences described herein, e.g. Seq ID Nos:207, 209, 211, 213, 215, 217, 219, 221, 223, 225, 227, 229, 231, 233, 235, 237, 536 and 538. A full length heavy chain amino acid sequence is Seq ID No:440 (heavy chain nucleic acid sequence Seq ID No:441). A full length light chain amino acid sequence is Seq ID No:447 (light chain nucleic acid sequence Seq ID No:448).

[0114] STIM006 has a heavy chain variable region (V_{H}) amino acid sequence of Seq ID No:452, comprising the CDRH1 amino acid sequence of Seq ID No:449, the CDRH2 amino acid sequence of Seq ID No:450, and the CDRH3 amino acid sequence of Seq ID No:451. The heavy chain nucleic acid sequence of the V_{H} domain is Seq ID No:453. STIM006 has a light chain variable region (V_{L}) amino acid sequence of Seq ID No:459, comprising the CDRL1 amino acid sequence of Seq ID No:456, the CDRL2 amino acid sequence of Seq ID No:457, and the CDRL3 amino acid sequence of Seq ID No:458. The light chain nucleic acid sequence of the V_{L} domain is Seq ID No:460. The V_{H} domain may be combined with any of the heavy chain constant region sequences described herein, e.g. Seq ID No:193, Seq ID No:195, Seq ID No:197, Seq ID No:199, Seq ID No:201, Seq ID No:203, Seq ID No:205, Seq ID No:340, Seq ID No:524, Seq ID No:526, Seq ID No:528, Seq ID No:530, Seq ID No:532 or Seq ID No:534. The V_{L} domain may be combined with any of the light chain constant region sequences described herein, e.g. Seq ID Nos:207, 209, 211, 213, 215, 217, 219, 221, 223, 225, 227, 229, 231, 233, 235, 237, 536 and 538. A full length heavy chain amino acid sequence is Seq ID No:454 (heavy chain nucleic acid sequence Seq ID No:455). A full length light chain amino acid sequence is Seq ID No:461 (light chain nucleic acid sequence Seq ID No:462).

[0115] STIM007 has a heavy chain variable region (V_{H}) amino acid sequence of Seq ID No:466, comprising the CDRH1 amino acid sequence of Seq ID No:463, the CDRH2 amino acid sequence of Seq ID No:464, and the CDRH3 amino acid sequence of Seq ID No:465. The heavy chain nucleic acid sequence of the V_{H} domain is Seq ID No:467. STIM007 has a light chain variable region (V_{L}) amino acid sequence of Seq ID No:473, comprising the CDRL1 amino acid sequence of Seq ID No:470, the CDRL2 amino acid sequence of Seq ID No:471, and the CDRL3 amino acid sequence of Seq ID No:472. The light chain nucleic acid sequence of the V_{L} domain is Seq ID No:474. The V_{H} domain may be combined with any of the heavy chain constant region sequences described herein, e.g. Seq ID No:193, Seq ID No:195, Seq ID No:197, Seq ID No:199, Seq ID No:201, Seq ID No:203, Seq ID No:205, Seq ID No:340, Seq ID No:524, Seq ID No:526, Seq ID No:528, Seq ID No:530, Seq ID No:532 or Seq ID No:534. The V_{L} domain may be combined with any of the light chain constant region sequences described herein, e.g. Seq ID Nos:207, 209, 211, 213, 215, 217, 219, 221, 223, 225, 227, 229, 231, 233, 235, 237, 536 and 538. A full length heavy chain amino acid sequence is Seq ID No:468 (heavy chain nucleic acid sequence Seq ID No:469). A full length light chain amino acid sequence is Seq ID No:475 (light chain nucleic acid sequence Seq ID No:476).

[0116] STIM008 has a heavy chain variable region (V_{H}) amino acid sequence of Seq ID No:480, comprising the CDRH1 amino acid sequence of Seq ID No:477, the CDRH2 amino acid sequence of Seq ID No:478, and the CDRH3 amino acid sequence of Seq ID No:479. The heavy chain nucleic acid sequence of the V_{H} domain is Seq ID No:481. STIM008 has a light chain variable region (V_{L}) amino acid sequence of Seq ID No:487, comprising the CDRL1 amino acid sequence of Seq ID No:484, the CDRL2 amino acid sequence of Seq ID No:485, and the CDRL3 amino acid sequence of Seq ID No:486. The light chain nucleic acid sequence of the V_{L} domain is Seq ID No:488. The V_{H} domain may be combined with any of the heavy chain constant region sequences described herein, e.g. Seq ID No:193, Seq ID No:195, Seq ID No:197, Seq ID No:199, Seq ID No:201, Seq ID No:203, Seq ID No:205, Seq ID No:340, Seq ID No:524, Seq ID No:526, Seq ID No:528, Seq ID No:530, Seq ID No:532 or Seq ID No:534. The V_{L} domain may be combined with any of the light chain constant region sequences described herein, e.g. Seq ID Nos:207, 209, 211, 213, 215, 217, 219, 221, 223, 225, 227, 229, 231, 233, 235, 237, 536 and 538. A full length heavy chain amino acid sequence is Seq ID No:482 (heavy chain nucleic acid sequence Seq ID No:483). A full length light chain amino acid sequence is Seq ID No:489 (light chain nucleic acid sequence Seq ID No:490).

[0117] STIM009 has a heavy chain variable region (V_{H}) amino acid sequence of Seq ID No:494, comprising the CDRH1 amino acid sequence of Seq ID No:491, the CDRH2 amino acid sequence of Seq ID No:492, and the CDRH3 amino acid sequence of Seq ID No:493. The heavy chain nucleic acid sequence of the V_{H} domain is Seq ID No:495. STIM009 has a light chain variable region (V_{L}) amino acid sequence of Seq ID No:501, comprising the CDRL1 amino acid sequence of Seq ID No:498, the CDRL2 amino acid sequence of Seq ID No:499, and the CDRL3 amino acid sequence of Seq ID No:500. The light chain nucleic acid sequence of the V_{L} domain is Seq ID No:502. The \ix domain may be combined with any of the heavy chain constant region sequences described herein, e.g. Seq ID No:193, Seq ID No:195, Seq ID No:197, Seq ID No:199, Seq ID No:201, Seq ID No:203, Seq ID No:205, Seq ID No:340, Seq ID No:524, Seq ID No:526, Seq ID No:528, Seq ID No:530, Seq ID No:532 or Seq ID No:534. The V_{L} domain may be combined with any of the light chain constant region sequences described herein, e.g. Seq ID Nos:207, 209, 211, 213, 215, 217, 219, 221, 223, 225, 227, 229, 231, 233, 235, 237, 536 and 538. A full length heavy chain amino acid sequence is Seq ID No:496 (heavy chain nucleic acid sequence Seq ID No:497). A full length light chain amino acid sequence is Seq ID No:503 (light chain nucleic acid sequence Seq ID No:504).

[0118] Additional exemplary anti-ICOS antibodies include, but are not limited to: 37A10S713 (also referred to as vopratelimab or JTX-2011) (see, e.g., U.S. Pat. Nos. 10,023,635 and 11,292,840; WO2017070423; WO 2016154177); XMAb23104 (also referred to as XmAb104) (see U.S. patent Ser. No. 10/981,992); 314.8 mAb (also referred to as Icos 314-8) (WO2014033327A1, WO2012131004A2; U.S. patent Ser. No. 11/180,556), JMab-136 (also referred to as IC009) (see, e.g., WO2008137915; U.S. Pat. No. 9,193,789, US20110243929A1) and ICOS.33 IgGlf S267E (U.S. patent Ser. No. 10/898,556). Antibodies to ICOS and methods of use in the treatment of disease are also described in WO2019222188A1 and U.S. patent Ser. No. 11/292,840 Antibodies to ICOS are also disclosed in EP1374902, EP1374901, and EP1125585. Agonist antibodies to ICOS are also disclosed in US20210340250A1; WO2018222711A2; WO2021209356A1; WO2016120789; US20160215059A1; and WO2012131004A2.

[0119] Sequences of heavy and light chains of 37A10S713 are disclosed as SEQ ID NOs:611-612.

37A10S713 Heavy Chain:
(SEQ ID NO: 611)
EVQLVESGGGLVQPGGSLRLSCAASGFTFSDYWMD
WVRQAPGKGLVWVSNIDEDGSITEYSPFVKGRFTI
SRDNAKNTLYLQMNSLRAEDTAVYYCTRWGRFGFD
SWGQGTLVTVSSASTKGPSVFPLAPSSKSTSGGTA
ALGCLVKDYFPEPVTVSWNSGALTSGVHTFPAVLQ
SSGLYSLSSVVTVPSSSLGTQTYICNVNHKPSNTK
VDKKVEPKSCDKTHTCPPCPAPELLGGPSVFLFPP
KPKDTLMISRTPEVTCVVVDVSHEDPEVKFNWYVD
GVEVHNAKTKPREEQYNSTYRVVSVLTVLHQDWLN
GKEYKCKVSNKALPAPIEKTISKAKGQPREPQVYT
LPPSREEMTKNQVSLTCLVKGFYPSDIAVEWESNG
QPENNYKTTPPVLDSDGSFFLYSKLTVDKSRWQQG
NVFSCSVMHEALHNHYTQKSLSLSPG
37A10S713 Light Chain:
(SEQ ID NO: 612)
DIVMTQSPDSLAVSLGERATINCKSSQSLLSGSFN
YLTWYQQKPGQPPKLLIFYASTRHTGVPDRFSGSG
SGTDFTLTISSLQAEDVAVYYCHHHYNAPPTFGPG
TKVDIKRTVAAPSVFIFPPSDEQLKSGTASVVCLL
NNFYPREAKVQWKVDNALQSGNSQESVTEQDSKDS
TYSLSSTLTLSKADYEKHKVYACEVTHQGLSSPVT
KSFNRGEC

[0120] In one embodiment, the ICOS binding protein is vopratelimab. In one embodiment, the ICOS binding protein is JTX-2011.

[0121] Sequences of heavy and light chains of XMAb23104 are disclosed as SEQ ID NOS:613-614.

XmAb23104 Heavy Chain:
(SEQ ID NO: 613)
QVQLVQSGAEVKKPGASVKVSCKASGYTFTGYYMH
WVRQAPGQGLEWMGWINPHSGETIYAQKFQGRVTM
TRDTSISTAYMELSSLRSEDTAVYYCARTYYYDTS
GYYHDAFDVWGQGTMVTVSSASTKGPSVFPLAPSS
KSTSGGTAALGCLVKDYFPEPVTVSWNSGALTSGV
HTFPAVLQSSGLYSLSSVVIVPSSSLGTQTYICNV
NHKPSDTKVDKKVEPKSCDKTHTCPPCPAPPVAGP
SVFLFPPKPKDTLMISRTPEVTCVVVDVKHEDPEV
KFNWYVDGVEVHNAKTKPREEEYNSTYRWSVLTVL
HQDWLNGKEYKCKVSNKALPAPIEKTISKAKGQPR
EPQVYTLPPSREEMTKNQVSLTCDVSGFYPSDIAV
EWESDGQPENNYKTTPPVLDSDGSFFLYSKLTVDK
SRWEQGDVFSCSVLHEALHSHYTQKSLSLSPGK
XmAb23104 Light Chain:
(SEQ ID NO: 614)
DIQMTQSPSSVSASVGDRVTITCRASQGISRLLAW
YQQKPGKAPKLLIYVASSLQSGVPSRFSGSGSGTD
FTLTISSLQPEDFATYYCQQANSFPWTFGQGTKVE
IK/RTVAAPSVFIFPPSDEQLKSGTASVVCLLNNF
YPREAKVQWKVDNALQSGNSQESVTEQDSKDSTYS
LSSTLTLSKADYEKHKVYACEVTHQGLSSPVTKSF
NRGEC

[0122] Sequences of heavy and light chain variable regions of 314.8 mAb are disclosed as SEQ ID NOS:615-616.

314.8 mAb Heavy Chain Variable Region:
(SEQ ID NO: 615)
MGWRCIILFLVSTATGVHSQVQLQQPGTELMKPGA
SVKLSCKASGYTFTTYWMHWVKQRPGQGLEWIGEI
DPSDSYVNYNQNFKGKATLTVDKSSSTAYIQLSSL
TSEDSAVYFCARSPDYYGTSLAWFDYWGQGTLVTV
ST
314.8 mAb Light Chain Variable Region:
(SEQ ID NO: 616)
MRCLAEFLGLLVLWIPGVIGDIVMTQAAPSVPVTP
GESVSISCRSSKSPLHSNGNIYLYWFLQRPGQSPQ
LLIYRMSNLASGVPDRFSGSGSGTTFTLKISRVEA
EDVGVYYCMQHLEYPYTFGGGTKLEIK

[0123] Sequences of heavy and light chain variable regions of JMab-136 are disclosed as SEQ ID Nos:617-618.

JMab-136 Heavy Chain Variable Region:
(SEQ ID NO: 617)
QVQLVQSGAEVKKPGASVKVSCKASGYTFTGYYMH
WVRQAPGQGLEWMGWINPHSGGTNYAQKFQGRVTM
TRDTSISTAYMELSRLRSDDTAVYYCARTYYYDSS
GYYHDAFDIWGQGTMVTVSS
JMab-136 Light Chain Variable Region:
(SEQ ID NO:618)
DIQMTQSPSSVSASVGDRVTITCRASQGISRLLAW
YQQKPGKAPKLLIYVASSLQSGVPSRFSGSGSGTD
FTLTISSLQPEDFATYYCQQANSFPWTFGQGTKVE
IK

[0124] Sequences of heavy and light chains of ICOS.33 IgGlf S267E are disclosed as SEQ ID NOs:619-620.

ICOS33 IgG1f S267E heavy chain:
SEQ ID NO: 619
EVQLVESGGGLVKPGGSLRLSCAASGFTFSDYFMH
WVRQAPGKGLEWVGVIDTKSFNYATYYSDLVKGRF
TISRDDSKNTLYLQMNSLKTEDTAVYYCTATIAVP
YYFDYWGQGTLVTVSSASTKGPSVFPLAPSSKSTS
GGTAALGCLVKDYFPEPVTVSWNSGALTSGVHTFP
AVLQSSGLYSLSSVVTVPSSSLGTQTYICNVNHKP
SNTKVDKRVEPKSCDKTHTCPPCPAPELLGGPSVF
LFPPKPKDTLMISRTPEVTCVVVDVEHEDPEVKFN
WYVDGVEVHNAKTKPREEQYNSTYRVVSVLTVLHQ
DWLNGKEYKCKVSNKALPAPIEKTISKAKGQPREP
QVYTLPPSREEMTKNQVSLTCLVKGFYPSDIAVEW
ESNGQPENNYKTTPPVLDSDGSFFLYSKLTVDKSR
WQQGNVFSCSVMHEALHNHYTQKSLSLSPG.
ICOS.33 IgG1f S267E light chain:
SEQ ID NO: 620
DIQMTQSPSSLSASVGDRVTITCQASQDISNYLSW
YQQKPGKAPKLLIYYTNLLAEGVPSRFSGSGSGTD
FTFTISSLQPEDIATYYCQQYYNYRTFGPGTKVDI
KRTVAAPSVFIFPPSDEQLKSGTASVVCLLNNFYP
REAKVQWKVDNALQSGNSQESVTEQDSKDSTYSLS
STLTLSKADYEKHKVYACEVTHQGLSSPVTKSFNR
GEC.

[0125] The term “antibody” refers to a (full length) antibody as well as to an antigen-binding fragment thereof. Antibodies according to the present invention are immunoglobulins or molecules comprising immunoglobulin domains, whether natural or partly or wholly synthetically produced. Antibodies may be IgG, IgM, IgA, IgD or IgE molecules or antigen-specific (antigen-binding) antibody fragments thereof (including, but not limited to, a Fab, F(ab′)₂, Fv, disulphide linked Fv, scFv, single domain antibody, closed conformation multispecific antibody, disulphide-linked scfv, diabody), whether derived from any species that naturally produces an antibody, or created by recombinant DNA technology; whether isolated from serum, B-cells, hybridomas, transfectomas, yeast or bacteria. Antibodies can be humanised using routine technology. The term antibody covers any polypeptide or protein comprising an antibody antigen-binding site. An antigen-binding site (paratope) is the part of an antibody that binds to and is complementary to the epitope of its target antigen (ICOS).

[0126] The term “epitope” refers to a region of an antigen that is bound by an antibody. Epitopes may be defined as structural or functional. Functional epitopes are generally a subset of the structural epitopes and have those residues that directly contribute to the affinity of the interaction. Epitopes may also be conformational, that is, composed of non-linear amino acids. In certain embodiments, epitopes may include determinants that are chemically active surface groupings of molecules such as amino acids, sugar side chains, phosphoryl groups, or sulfonyl groups, and, in certain embodiments, may have specific three-dimensional structural characteristics, and/or specific charge characteristics.

[0127] The antigen binding site is a polypeptide or domain that comprises one or more CDRs of an antibody and is capable of binding the antigen. For example, the polypeptide comprises a CDR3 (e.g., HCDR3). For example the polypeptide comprises CDRs 1 and 2 (e.g., HCDR1 and 2) or CDRs 1-3 of a variable domain of an antibody (e.g., HCDRs1-3).

[0128] An antibody antigen-binding site may be provided by one or more antibody variable domains. In an example, the antibody binding site is provided by a single variable domain, e.g., a heavy chain variable domain (VH domain) or a light chain variable domain (VL domain). In another example, the binding site comprises a VH/VL pair or two or more of such pairs. Thus, an antibody antigen-binding site may comprise a VH and a VL.

[0129] The antibody may be a whole immunoglobulin, including constant regions, or may be an antibody fragment, e.g., antigen-binding fragment of an antibody. An antibody fragment is a portion of an intact antibody, for example comprising the antigen binding and/or variable region of the intact antibody. Examples of antibody fragments include:

(i) a Fab fragment, a monovalent fragment consisting of the VL, VH, CL and CH1 domains;
(ii) a F(ab′)2 fragment, a bivalent fragment including two Fab fragments linked by a disulfide bridge at the hinge region;
(iii) an Fd fragment consisting of the VH and CH1 domains;
(iv) an Fv fragment consisting of the VL and VH domains of a single arm of an antibody,
(v) a dAb fragment (Ward et al., (1989) Nature 341:544-546; which is incorporated by reference herein in its entirety), which consists of a VH or VL domain; and
(vi) an isolated complementarity determining region (CDR) that retains specific antigen-binding functionality.

[0130] Further examples of antibodies are H2 antibodies that comprise a dimer of a heavy chain (5′-VH-(optional hinge)-CH2-CH3-3′) and are devoid of a light chain.

[0131] Single-chain antibodies (e.g., scFv) are a commonly used fragment. Multispecific antibodies may be formed from antibody fragments. An antibody of the invention may employ any such format, as appropriate.

[0132] Optionally, the antibody immunoglobulin domains may be fused or conjugated to additional polypeptide sequences and/or to labels, tags, toxins or other molecules. Antibody immunoglobulin domains may be fused or conjugated to one or more different antigen binding regions, providing a molecule that is able to bind a second antigen in addition to ICOS. An antibody of the present invention may be a multispecific antibody, e.g., a bispecific antibody, comprising (i) an antibody antigen binding site for ICOS and (ii) a further antigen binding site (optionally an antibody antigen binding site, as described herein) which recognises another antigen (e.g., PD-L1).

[0133] An antibody normally comprises an antibody VH and/or VL domain. Isolated VH and VL domains of antibodies are also part of the invention. The antibody variable domains are the portions of the light and heavy chains of antibodies that include amino acid sequences of complementarity determining regions (CDRs; ie., CDR1, CDR2, and CDR3), and framework regions (FRs). Thus, within each of the VH and VL domains are CDRs and FRs. A VH domain comprises a set of HCDRs, and a VL domain comprises a set of LCDRs. VH refers to the variable domain of the heavy chain. VL refers to the variable domain of the light chain. Each VH and VL is typically composed of three CDRs and four FRs, arranged from amino-terminus to carboxy-terminus in the following order: FR1, CDR1, FR2, CDR2, FR3, CDR3, FR4. According to the methods used in this invention, the amino acid positions assigned to CDRs and FRs may be defined according to Kabat (Sequences of Proteins of Immunological Interest (National Institutes of Health, Bethesda, Md., 1987 and 1991)) or according to IMGT nomenclature. An antibody may comprise an antibody VH domain comprising a VH CDR1, CDR2 and CDR3 and a framework. It may alternatively or also comprise an antibody VL domain comprising a VL CDR1, CDR2 and CDR3 and a framework. Examples of antibody VH and VL domains and CDRs according to the present invention are as listed in the appended sequence listing that forms part of the present disclosure. The CDRs shown in the sequence listing are defined according to the IMGT system [18]. All VH and VL sequences, CDR sequences, sets of CDRs and sets of HCDRs and sets of LCDRs disclosed herein represent aspects and embodiments of the invention. As described herein, a “set of CDRs” comprises CDR1, CDR2 and CDR3. Thus, a set of HCDRs refers to HCDR1, HCDR2 and HCDR3, and a set of LCDRs refers to LCDR1, LCDR2 and LCDR3. Unless otherwise stated, a “set of CDRs” includes HCDRs and LCDRs.

[0134] An antibody the invention may comprise one or more CDRs as described herein, e.g. a CDR3, and optionally also a CDR1 and CDR2 to form a set of CDRs. The CDR or set of CDRs may be a CDR or set of CDRs of any of STIM001, STIM002, STIM002-B, STIM003, STIM004, STIM005, STIM006, STIM007, STIM008 and STIM009, or may be a variant thereof as described herein.

[0135] The invention provides antibodies comprising an HCDR1, HCDR2 and/or HCDR3 of any of antibodies STIM001, STIM002, STIM002-B, STIM003, STIM004, STIM005, STIM006, STIM007, STIM008 and STIM009 and/or an LCDR1, LCDR2 and/or LCDR3 of any of these antibodies, e.g. a set of CDRs. The antibody may comprise a set of VH CDRs of one of these antibodies. Optionally it may also comprise a set of VL CDRs of one of these antibodies, and the VL CDRs may be from the same or a different antibody as the VH CDRs.

[0136] A VH domain comprising a disclosed set of HCDRs, and/or a VL domain comprising a disclosed set of LCDRs, are also provided by the invention.

[0137] Typically, a VH domain is paired with a VL domain to provide an antibody antigen-binding site, although as discussed further below a VH or VL domain alone may be used to bind antigen. The STIM003 VH domain may be paired with the STIM003 VL domain, so that an antibody antigen-binding site is formed comprising both the STIM003 VH and VL domains. Analogous embodiments are provided for the other VH and VL domains disclosed herein. In other embodiments, the STIM003 VH is paired with a VL domain other than the STIM003 VL. Light-chain promiscuity is well established in the art. Again, analogous embodiments are provided by the invention for the other VH and VL domains disclosed herein.

[0138] Thus, the VH of any of antibodies STIM001, STIM002, STIM003, STIM004 and STIM005 may be paired with the VL of any of antibodies STIM001, STIM002, STIM003, STIM004 and STIM005. Further, the VH of any of antibodies STIM001, STIM002, STIM002-B, STIM003, STIM004, STIM005, STIM006, STIM007, STIM008 and STIM009 may be paired with the VL of any of antibodies STIM001, STIM002, STIM002-B, STIM003, STIM004, STIM005, STIM006, STIM007, STIM008 or STIM009.

[0139] An antibody may comprise one or more CDRs, e.g. a set of CDRs, within an antibody framework. The framework regions may be of human germline gene segment sequences. Thus, the antibody may be a human antibody having a VH domain comprising a set of HCDRs in a human germline framework. Normally the antibody also has a VL domain comprising a set of LCDRs, e.g. in a human germline framework. An antibody “gene segment”, e.g., a VH gene segment, D gene segment, or JH gene segment refers to oligonucleotide having a nucleic acid sequence from which that portion of an antibody is derived, e.g., a VH gene segment is an oligonucleotide comprising a nucleic acid sequence that corresponds to a polypeptide VH domain from FR1 to part of CDR3. Human V, D and J gene segments recombine to generate the VH domain, and human V and J segments recombine to generate the V_{L} domain. The D domain or region refers to the diversity domain or region of an antibody chain. J domain or region refers to the joining domain or region of an antibody chain. Somatic hypermutation may result in an antibody VH or VL domain having framework regions that do not exactly match or align with the corresponding gene segments, but sequence alignment can be used to identify the closest gene segments and thus identify from which particular combination of gene segments a particular VH or VL domain is derived. When aligning antibody sequences with gene segments, the antibody amino acid sequence may be aligned with the amino acid sequence encoded by the gene segment, or the antibody nucleotide sequence may be aligned directly with the nucleotide sequence of the gene segment.

[0140] Alignments of STIM antibody VH and VL domain sequences against related antibodies and against human germline sequences are shown in FIG. 5, FIG. 6 and FIG. 7.

[0141] An antibody of the invention may be a human antibody or a chimaeric antibody comprising human variable regions and non-human (e.g., mouse) constant regions. The antibody of the invention for example has human variable regions, and optionally also has human constant regions.

[0142] Thus, antibodies optionally include constant regions or parts thereof, e.g., human antibody constant regions or parts thereof. For example, a V_{L} domain may be attached at its C-terminal end to antibody light chain kappa or lambda constant domains. Similarly, an antibody V_{H} domain may be attached at its C-terminal end to all or part (e.g. a CH1 domain or Fc region) of an immunoglobulin heavy chain constant region derived from any antibody isotype, e.g. IgG, IgA, IgE and IgM and any of the isotype sub-classes, such as IgG1 or IgG4.

[0143] Examples of human heavy chain constant regions are shown in Table S1.

[0144] Constant regions of antibodies of the invention may alternatively be non-human constant regions. For example, when antibodies are generated in transgenic animals (examples of which are described elsewhere herein), chimaeric antibodies may be produced comprising human variable regions and non-human (host animal) constant regions. Some transgenic animals generate fully human antibodies. Others have been engineered to generate antibodies comprising chimaeric heavy chains and fully human light chains. Where antibodies comprise one or more non-human constant regions, these may be replaced with human constant regions to provide antibodies more suitable for administration to humans as therapeutic compositions, as their immunogenicity is thereby reduced.

[0145] Digestion of antibodies with the enzyme papain, results in two identical antigen-binding fragments, known also as “Fab” fragments, and a “Fc” fragment, having no antigen-binding activity but having the ability to crystallize. “Fab” when used herein refers to a fragment of an antibody that includes one constant and one variable domain of each of the heavy and light chains. The term “Fc region” herein is used to define a C-terminal region of an immunoglobulin heavy chain, including native-sequence Fc regions and variant Fc regions. The “Fc fragment” refers to the carboxy-terminal portions of both H chains held together by disulfides. The effector functions of antibodies are determined by sequences in the Fc region, the region which is also recognised by Fc receptors (FcR) found on certain types of cells. Digestion of antibodies with the enzyme pepsin, results in the a F(ab′)2 fragment in which the two arms of the antibody molecule remain linked and comprise two-antigen binding sites. The F(ab′)2 fragment has the ability to crosslink antigen.

[0146] “Fv” when used herein refers to the minimum fragment of an antibody that retains both antigen-recognition and antigen-binding sites. This region consists of a dimer of one heavy and one light chain variable domain in tight, non-covalent or covalent association. It is in this configuration that the three CDRs of each variable domain interact to define an antigen-binding site on the surface of the VH-VL dimer. Collectively, the six CDRs confer antigen-binding specificity to the antibody. However, even a single variable domain (or half of an Fv comprising only three CDRs specific for an antigen) has the ability to recognise and bind antigen, although at a lower affinity than the entire binding site.

[0147] Antibodies disclosed herein may be modified to increase or decrease serum half-life. In one embodiment, one or more of the following mutations: T252L, T254S or T256F are introduced to increase biological half-life of the antibody. Biological half-life can also be increased by altering the heavy chain constant region CH₁ domain or CL region to contain a salvage receptor binding epitope taken from two loops of a CH2 domain of an Fc region of an IgG, as described in U.S. Pat. Nos. 5,869,046 and 6,121,022, the modifications described therein are incorporated herein by reference. In another embodiment, the Fc hinge region of an antibody or antigen-binding fragment of the invention is mutated to decrease the biological half-life of the antibody or fragment. One or more amino acid mutations are introduced into the CH2-CH3 domain interface region of the Fc-hinge fragment such that the antibody or fragment has impaired Staphylococcyl protein A (SpA) binding relative to native Fc-hinge domain SpA binding. Other methods of increasing serum half-life are known to those skilled in the art. Thus, in one embodiment, the antibody or fragment is PEGylated. In another embodiment, the antibody or fragment is fused to an albumin-biding domain, e.g. an albumin binding single domain antibody (dAb). In another embodiment, the antibody or fragment is PASylated (i.e. genetic fusion of polypeptide sequences composed of PAS (XL-Protein GmbH) which forms uncharged random coil structures with large hydrodynamic volume). In another embodiment, the antibody or fragment is XTENylated®/rPEGylated (i.e. genetic fusion of non-exact repeat peptide sequence (Amunix, Versartis) to the therapeutic peptide). In another embodiment, the antibody or fragment is ELPylated (i.e. genetic fusion to ELP repeat sequence (PhaseBio)). These various half-life extending fusions are described in more detail in Strohl, BioDrugs (2015) 29:215-239, which fusions, e.g. in Tables 2 and 6, are incorporated herein by reference.

[0148] The antibody may have a modified constant region which increases stability. Thus, in one embodiment, the heavy chain constant region comprises a Ser228Pro mutation. In another embodiment, the antibodies and fragments disclosed herein comprise a heavy chain hinge region that has been modified to alter the number of cysteine residues. This modification can be used to facilitate assembly of the light and heavy chains or to increase or decrease the stability of the antibody.

[0149] 1.6.9. Fc Effector Functions, ADCC, ADCP and CDC

[0150] As discussed above, anti-ICOS antibodies can be provided in various isotypes and with different constant regions. Examples of human IgG antibody heavy chain constant region sequences are shown in Table S1. The Fc region of the antibody primarily determines its effector function in terms of Fc binding, antibody-dependent cell-mediated cytotoxicity (ADCC) activity, complement dependent cytotoxicity (CDC) activity and antibody-dependent cell phagocytosis (ADCP) activity. These “cellular effector functions”, as distinct from effector T cell function, involve recruitment of cells bearing Fc receptors to the site of the target cells, resulting in killing of the antibody-bound cell. In addition to ADCC and CDC, the ADCP mechanism [19] represents a means of depleting antibody-bound T cells, and thus targeting high ICOS expressing TRegs for deletion.

[0151] Cellular effector functions ADCC, ADCP and/or CDC may also be exhibited by antibodies lacking Fc regions. Antibodies may comprise multiple different antigen-binding sites, one directed to ICOS and another directed to a target molecule where engagement of that target molecule induces ADCC, ADCP and/or CDC, e.g., an antibody comprising two scFv regions joined by a linker, where one scFv can engage an effector cell.

[0152] An antibody according to the present invention may be one that exhibits ADCC, ADCP and/or CDC. Alternatively, an antibody according to the present invention may lack ADCC, ADCP and/or CDC activity. In either case, an antibody according to the present invention may comprise, or may optionally lack, an Fc region that binds to one or more types of Fc receptor. Use of different antibody formats, and the presence or absence of FcR binding and cellular effector functions, allow the antibody to be tailored for use in particular therapeutic purposes as discussed elsewhere herein.

[0153] A suitable antibody format for some therapeutic applications employs a wild-type human IgG1 constant region. A constant region may be an effector-enabled IgG1 constant region, optionally having ADCC and/or CDC and/or ADCP activity. A suitable wild type human IgG1 constant region sequence is SEQ ID NO: 340 (IGHG1*01). Further examples of human IgG1 constant regions are shown in Table 51.

[0154] For testing of candidate therapeutic antibodies in mouse models of human disease, an effector positive mouse constant region, such as mouse IgG2a (mIgG2a), may be included instead of an effector positive human constant region.

[0155] A constant region may be engineered for enhanced ADCC and/or CDC and/or ADCP.

[0156] The potency of Fc-mediated effects may be enhanced by engineering the Fc domain by various established techniques. Such methods increase the affinity for certain Fc-receptors, thus creating potential diverse profiles of activation enhancement. This can achieved by modification of one or several amino acid residues [20]. Human IgG1 constant regions containing specific mutations or altered glycosylation on residue Asn297 (e.g., N297Q, EU index numbering) have been shown to enhance binding to Fc receptors. Example mutations are one or more of the residues selected from 239, 332 and 330 for human IgG1 constant regions (or the equivalent positions in other IgG isotypes). An antibody may thus comprise a human IgG1 constant region having one or more mutations independently selected from N297Q, S239D, I332E and A330L (EU index numbering). A triple mutation (M252Y/S254T/T256E) may be used to enhance binding to FcRn, and other mutations affecting FcRn binding are discussed in Table 2 of [21], any of which may be employed in the present invention.

[0157] Increased affinity for Fc receptors can also be achieved by altering the natural glycosylation profile of the Fc domain by, for example, generating under fucosylated or defucosylated variants [22]. Non-fucosylated antibodies harbour a tri-mannosyl core structure of complex-type N-glycans of Fc without fucose residue. These glycoengineered antibodies that lack core fucose residue from the Fc N-glycans may exhibit stronger ADCC than fucosylated equivalents due to enhancement of FcγRIIIa binding capacity. For example, to increase ADCC, residues in the hinge region can be altered to increase binding to Fc-gamma RIII [23]. Thus, an antibody may comprise a human IgG heavy chain constant region that is a variant of a wild-type human IgG heavy chain constant region, wherein the variant human IgG heavy chain constant region binds to human Fcγ receptors selected from the group consisting of FcγRIIB and FcγRIIA with higher affinity than the wild type human IgG heavy chain constant region binds to the human Fcγ receptors. The antibody may comprise a human IgG heavy chain constant region that is a variant of a wild type human IgG heavy chain constant region, wherein the variant human IgG heavy chain constant region binds to human FcγRIIB with higher affinity than the wild type human IgG heavy chain constant region binds to human FcγRIIB. The variant human IgG heavy chain constant region can be a variant human IgG1, a variant human IgG2, or a variant human IgG4 heavy chain constant region. In one embodiment, the variant human IgG heavy chain constant region comprises one or more amino acid mutations selected from G236D, P238D, S239D, S267E, L328F, and L328E (EU index numbering system). In another embodiment, the variant human IgG heavy chain constant region comprises a set of amino acid mutations selected from the group consisting of: S267E and L328F; P238D and L328E; P238D and one or more substitutions selected from the group consisting of E233D, G237D, H268D, P271G, and A330R; P238D, E233D, G237D, H268D, P271G, and A330R; G236D and S267E; S239D and S267E; V262E, S267E, and L328F; and V264E, S267E, and L328F (EU index numbering system). The enhancement of CDC may be achieved by amino acid changes that increase affinity for C1q, the first component of the classic complement activation cascade [24]. Another approach is to create a chimeric Fc domain created from human IgG1 and human IgG3 segments that exploit the higher affinity of IgG3 for C1q [25]. Antibodies of the present invention may comprise mutated amino acids at residues 329, 331 and/or 322 to alter the C1q binding and/or reduced or abolished CDC activity. In another embodiment, the antibodies or antibody fragments disclosed herein may contain Fc regions with modifications at residues 231 and 239, whereby the amino acids are replaced to alter the ability of the antibody to fix complement. In one embodiment, the antibody or fragment has a constant region comprising one or more mutations selected from E345K, E430G, R344D and D356R, in particular a double mutation comprising R344D and D356R (EU index numbering system).

[0158] WO2008/137915 described anti-ICOS antibodies with modified Fc regions having enhanced effector function. The antibodies were reported to mediate enhanced ADCC activity as compared to the level of ADCC activity mediated by a parent antibody comprising the VH and VK domains and a wild type Fc region. Antibodies according to the present invention may employ such variant Fc regions having effector function as described therein.

[0159] ADCC activity of an antibody may be determined in an assay, such as the assays disclosed in WO2008/137915. ADCC activity of an anti-ICOS antibody may be determined in vitro using an ICOS positive T cell line as described in Example 10 of U.S. Pat. No. 9,957,323. ADCC activity of an anti-PD-L1 antibody may be determined in vitro in an ADCC assay using PD-L1 expressing cells.

[0160] For certain applications (such as in the context of vaccination) it may be preferred to use antibodies without Fc effector function. Antibodies may be provided without a constant region, or without an Fc region—examples of such antibody formats are described elsewhere herein. Alternatively, an antibody may have a constant region which is effector null. An antibody may have a heavy chain constant region that does not bind Fcγ receptors, for example the constant region may comprise a Leu235Glu mutation (i.e., where the wild type leucine residue is mutated to a glutamic acid residue). Another optional mutation for a heavy chain constant region is Ser228Pro, which increases stability. A heavy chain constant region may be an IgG4 comprising both the Leu235Glu mutation and the Ser228Pro mutation. This “IgG4-PE” heavy chain constant region is effector null.

[0161] An alternative effector null human constant region is a disabled IgG1. A disabled IgG1 heavy chain constant region may contain alanine at position 235 and/or 237 (EU index numbering), e.g., it may be a IgG1*01 sequence comprising the L235A and/or G237A mutations (“LAGA”).

[0162] A variant human IgG heavy chain constant region may comprise one or more amino acid mutations that reduce the affinity of the IgG for human FcγRIIIA, human FcγRIIA, or human FcγRT. In one embodiment, the FcγRIIB is expressed on a cell selected from the group consisting of macrophages, monocytes, B-cells, dendritic cells, endothelial cells, and activated T-cells. In one embodiment, the variant human IgG heavy chain constant region comprises one or more of the following amino acid mutations G236A, S239D, F243L, T256A, K290A, R292P, S298A, Y300L, V305I, A330L, I332E, E333A, K334A, A339T, and P396L (EU index numbering system). In one embodiment, the variant human IgG heavy chain constant region comprises a set of amino acid mutations selected from the group consisting of: S239D; T256A; K290A; S298A; I332E; E333A; K334A; A339T; S239D and I332E; S239D, A330L, and I332E; S298A, E333A, and K334A; G236A, S239D, and I332E; and F243L, R292P, Y300L, V305I, and P396L (EU index numbering system). In one embodiment, the variant human IgG heavy chain constant region comprises a S239D, A330L, or I332E amino acid mutations (EU index numbering system). In one embodiment, the variant human IgG heavy chain constant region comprises an S239D and I332E amino acid mutations (EU index numbering system). In one embodiment, the variant human IgG heavy chain constant region is a variant human IgG1 heavy chain constant region comprising the S239D and I332E amino acid mutations (EU index numbering system). In one embodiment, the antibody or fragment comprises an afucosylated Fc region. In another embodiment, the antibody or fragment thereof is defucosylated. In another embodiment, the antibody or fragment is under fucosylated.

[0163] An antibody may have a heavy chain constant region that binds one or more types of Fc receptor but does not induce cellular effector functions, i.e., does not mediate ADCC, CDC or ADCP activity. Such a constant region may be unable to bind the particular Fc receptor(s) responsible for triggering ADCC, CDC or ADCP activity.

[0164] 1.6.10. Generating and Modifying Antibodies

[0165] Methods for identifying and preparing antibodies are well known. Antibodies may be generated using transgenic mice (eg, the Kymouse™, Velocimouse®, Omnimouse®, Xenomouse®, HuMab Mouse® or MeMo Mouse®), rats (e.g., the Omnirat®), camelids, sharks, rabbits, chickens or other non-human animals immunised with ICOS or a fragment thereof or a synthetic peptide comprising an ICOS sequence motif of interest, followed optionally by humanisation of the constant regions and/or variable regions to produce human or humanised antibodies. In an example, display technologies can be used, such as yeast, phage or ribosome display, as will be apparent to the skilled person. Standard affinity maturation, e.g., using a display technology, can be performed in a further step after isolation of an antibody lead from a transgenic animal, phage display library or other library. Representative examples of suitable technologies are described in US20120093818 (Amgen, Inc), which is incorporated by reference herein in its entirety, eg, the methods set out in paragraphs [0309] to [0346].

[0166] Immunisation of an ICOS knock out non-human animal with human ICOS antigen facilitates the generation of antibodies that recognise both human and non-human ICOS. As described herein and illustrated in the Examples, an ICOS knock out mouse can be immunised with cells expressing human ICOS to stimulate production of antibodies to human and mouse ICOS in the mouse, which can be recovered and tested for binding to human ICOS and to mouse ICOS. Cross-reactive antibodies can thus be selected, which may be screened for other desirable properties as described herein. Methods of generating antibodies to an antigen (e.g., a human antigen), through immunisation of animals with the antigen where expression of the endogenous antigen (e.g, endogenous mouse antigen) has been knocked-out in the animal, may be performed in animals capable of generating antibodies comprising human variable domains. The genomes of such animals can be engineered to comprise a human or humanised immunoglobulin locus encoding human variable region gene segments, and optionally an endogenous constant region or a human constant region. Recombination of the human variable region gene segments generates human antibodies, which may have either a non-human or human constant region. Non-human constant regions may subsequently be replaced by human constant regions where the antibody is intended for in vivo use in humans. Such methods and knock-out transgenic animals are described in WO2013/061078.

[0167] Generally, a Kymouse™, VELOCIMMUNE® or other mouse or rat (optionally an ICOS knock out mouse or rat, as noted) can be challenged with the antigen of interest, and lymphatic cells (such as B-cells) are recovered from the mice that express antibodies. The lymphatic cells may be fused with a myeloma cell line to prepare immortal hybridoma cell lines, and such hybridoma cell lines are screened and selected to identify hybridoma cell lines that produce antibodies specific to the antigen of interest. DNA encoding the variable regions of the heavy chain and light chain may be isolated and linked to desirable isotypic constant regions of the heavy chain and light chain. Such an antibody protein may be produced in a cell, such as a CHO cell. Alternatively, DNA encoding the antigen-specific chimaeric antibodies or the variable domains of the light and heavy chains may be isolated directly from antigen-specific lymphocytes.

[0168] Initially, high affinity chimaeric antibodies are isolated having a human variable region and a mouse constant region. The antibodies are characterised and selected for desirable characteristics, including affinity, selectivity, agonism, T-cell dependent killing, neutralising potency, epitope, etc. The mouse constant regions are optionally replaced with a desired human constant region to generate the fully human antibody of the invention, for example wild-type or modified IgG1 or IgG4 (for example, SEQ ID NO: 751, 752, 753 in US2011/0065902 (which is incorporated by reference herein in its entirety). While the constant region selected may vary according to specific use, high affinity antigen-binding and target specificity characteristics reside in the variable region.

[0169] Thus, in a further aspect, the present invention provides a transgenic non-human mammal having a genome comprising a human or humanised immunoglobulin locus, wherein the mammal does not express ICOS. The mammal may for instance be a knock-out mouse or rat, or other laboratory animal species. Transgenic mice such as the Kymouse™ contain human heavy and light chain immunoglobulin loci inserted at the corresponding endogenous mouse immunoglobulin loci. A transgenic mammal according to the present invention may be one that contains such targeted insertions, or it may contain human heavy and light chain immunoglobulin loci or immunoglobulin genes that are randomly inserted in its genome, inserted at a locus other than the endogenous Ig locus, or provided on an additional chromosome or chromosomal fragment.

[0170] Further aspects of the invention are the use of such non-human mammals for producing antibodies to ICOS, and methods of producing antibodies or antibody heavy and/or light chain variable domains in such mammals.

[0171] A method of producing an antibody that binds the extracellular domain of human and non-human ICOS may comprise providing a transgenic non-human mammal having a genome comprising a human or humanised immunoglobulin locus, wherein the mammal does not express ICOS, and

(a) immunising the mammal with human ICOS antigen (e.g., with cells expressing human ICOS or with purified recombinant ICOS protein);
(b) isolating antibodies generated by the mammal;
(c) testing the antibodies for ability to bind human ICOS and non-human ICOS; and
(d) selecting one or more antibodies that binds both human and non-human ICOS.

[0172] Testing for ability to bind human ICOS and non-human ICOS may be done using surface plasmon resonance, HTRF, FACS or any other method described herein. Optionally, binding affinities for human and mouse ICOS are determined. The affinity, or fold-difference in affinity, of binding to human ICOS and mouse ICOS may be determined, and antibodies displaying species cross-reactivity may thus be selected (affinity thresholds and fold-differences that may be used as selection criteria are exemplified elsewhere herein). Neutralising potency, or fold difference in neutralising potency, of the antibody for inhibiting human and mouse ICOS ligand binding to the human and mouse ICOS receptor respectively may also or alternatively be determined as a way to screen for cross-reactive antibodies, e.g., in an HTRF assay. Again, possible thresholds and fold-differences that may be used as selection criteria are exemplified elsewhere herein.

[0173] The method may comprise testing the antibodies for ability to bind non-human ICOS from the same species or from a different species as the immunised mammal. Thus, where the transgenic mammal is a mouse (e.g., a Kymouse™), antibodies may be tested for ability to bind mouse ICOS. Where the transgenic mammal is a rat, antibodies may be tested for ability to bind rat ICOS. However, it may be equally useful to determine cross-reactivity of an isolated antibody for non-human ICOS of another species. Thus, antibodies generated in goats may be tested for binding to rat or mouse ICOS. Optionally, binding to goat ICOS may be determined instead or additionally.

[0174] In other embodiments, the transgenic non-human mammal may be immunised with non-human ICOS, optionally ICOS of the same mammalian species (e.g., an ICOS knock-out mouse may be immunised with mouse ICOS) instead of human ICOS. Affinity of isolated antibodies for binding to human ICOS and non-human ICOS is then determined in the same way, and antibodies that bind both human and non-human ICOS are selected.

[0175] Nucleic acid encoding an antibody heavy chain variable domain and/or an antibody light chain variable domain of a selected antibody may be isolated. Such nucleic acid may encode the full antibody heavy chain and/or light chain, or the variable domain(s) without associated constant region(s). As noted, encoding nucleotide sequences may be obtained directly from antibody-producing cells of a mouse, or B cells may be immortalised or fused to generate hybridomas expressing the antibody, and encoding nucleic acid obtained from such cells. Optionally, nucleic acid encoding the variable domain(s) is then conjugated to a nucleotide sequence encoding a human heavy chain constant region and/or human light chain constant region, to provide nucleic acid encoding a human antibody heavy chain and/or human antibody light chain, e.g., encoding an antibody comprising both the heavy and light chain. As described elsewhere herein, this step is particularly useful where the immunised mammal produces chimaeric antibodies with non-human constant regions, which are preferably replaced with human constant regions to generate an antibody that will be less immunogenic when administered to humans as a medicament. Provision of particular human isotype constant regions is also significant for determining the effector function of the antibody, and a number of suitable heavy chain constant regions are discussed herein.

[0176] Other alterations to nucleic acid encoding the antibody heavy and/or light chain variable domain may be performed, such as mutation of residues and generation of variants, as described herein.

[0177] The isolated (optionally mutated) nucleic acid may be introduced into host cells, e.g., CHO cells as discussed. Host cells are then cultured under conditions for expression of the antibody, or of the antibody heavy and/or light chain variable domain, in any desired antibody format. Some possible antibody formats are described herein, e.g., whole immunoglobulins, antigen-binding fragments, and other designs.

[0178] Variable domain amino acid sequence variants of any of the VH and VL domains or CDRs whose sequences are specifically disclosed herein may be employed in accordance with the present invention, as discussed.

[0179] There are many reasons why it may be desirable to create variants, which include improving the antibody sequence for large-scale manufacturing, facilitating purification, enhancing stability or improving suitability for inclusion in a desired pharmaceutical formulation. Protein engineering work can be performed at one or more target residues in the antibody sequence, e.g., to substituting one amino acid with an alternative amino acid (optionally, generating variants containing all naturally occurring amino acids at this position, with the possible exception of Cys and Met), and monitoring the impact on function and expression to determine the best substitution. It is in some instances undesirable to substitute a residue with Cys or Met, or to introduce these residues into a sequence, as to do so may generate difficulties in manufacturing—for instance through the formation of new intramolecular or intermolecular cysteine-cysteine bonds. Where a lead candidate has been selected and is being altered for manufacturing and clinical development, it will generally be desirable to change its antigen-binding properties as little as possible, or at least to retain the affinity and potency of the parent molecule. However, variants may also be generated in order to modulate key antibody characteristics such as affinity, cross-reactivity or neutralising potency.

[0180] An antibody may comprise a set of H and/or L CDRs of any of the disclosed antibodies with one or more amino acid mutations within the disclosed set of H and/or L CDRs. The mutation may be an amino acid substitution, deletion or insertion. Thus for example there may be one or more amino acid substitutions within the disclosed set of H and/or L CDRs. For example, there may be up to 12, 11, 10, 9, 8, 7, 6, 5, 4, 3 or 2 mutations e.g. substitutions, within the set of H and/or L CDRs. For example, there may be up to 6, 5, 4, 3 or 2 mutations, e.g. substitutions, in HCDR3 and/or there may be up to 6, 5, 4, 3, or 2 mutations, e.g. substitutions, in LCDR3. An antibody may comprise the set of HCDRs, LCDRs or a set of 6 (H and L) CDRs shown for any STIM antibody herein or may comprise that set of CDRs with one or two conservative substitutions.

[0181] One or more amino acid mutations may optionally be made in framework regions of an antibody VH or VL domain disclosed herein. For example, one or more residues that differ from the corresponding human germline segment sequence may be reverted to germline. Human germline gene segment sequences corresponding to VH and VL domains of example anti-ICOS antibodies are indicated in Table E12-1, Table E12-2 and Table E12-3, and alignments of antibody VH and VL domains to corresponding germline sequences are shown in the drawings.

[0182] An antibody may comprise a VH domain that has at least 60, 70, 80, 85, 90, 95, 98 or 99% amino acid sequence identity with a VH domain of any of the antibodies shown in the appended sequence listing, and/or comprising a VL domain that has at least 60, 70, 80, 85, 90, 95, 98 or 99% amino acid sequence identity with a VL domain of any of those antibodies. Algorithms that can be used to calculate % identity of two amino acid sequences include e.g. BLAST, FASTA, or the Smith-Waterman algorithm, e.g. employing default parameters. Particular variants may include one or more amino acid sequence alterations (addition, deletion, substitution and/or insertion of an amino acid residue).

[0183] Alterations may be made in one or more framework regions and/or one or more CDRs. Variants are optionally provided by CDR mutagenesis. The alterations normally do not result in loss of function, so an antibody comprising a thus-altered amino acid sequence may retain an ability to bind ICOS. It may retain the same quantitative binding ability as an antibody in which the alteration is not made, e.g. as measured in an assay described herein. The antibody comprising a thus-altered amino acid sequence may have an improved ability to bind ICOS.

[0184] Alteration may comprise replacing one or more amino acid residue with a non-naturally occurring or non-standard amino acid, modifying one or more amino acid residue into a non-naturally occurring or non-standard form, or inserting one or more non-naturally occurring or non-standard amino acid into the sequence. Examples of numbers and locations of alterations in sequences of the invention are described elsewhere herein. Naturally occurring amino acids include the 20 “standard” L-amino acids identified as G, A, V, L, I, M, P, F, W, S, T, N, Q, Y, C, K, R, H, D, E by their standard single-letter codes. Non-standard amino acids include any other residue that may be incorporated into a polypeptide backbone or result from modification of an existing amino acid residue. Non-standard amino acids may be naturally occurring or non-naturally occurring.

[0185] The term “variant” as used herein refers to a peptide or nucleic acid that differs from a parent polypeptide or nucleic acid by one or more amino acid or nucleic acid deletions, substitutions or additions, yet retains one or more specific functions or biological activities of the parent molecule. Amino acid substitutions include alterations in which an amino acid is replaced with a different naturally-occurring amino acid residue. Such substitutions may be classified as “conservative”, in which case an amino acid residue contained in a polypeptide is replaced with another naturally occurring amino acid of similar character either in relation to polarity, side chain functionality or size. Such conservative substitutions are well known in the art. Substitutions encompassed by the present invention may also be “non-conservative”, in which an amino acid residue which is present in a peptide is substituted with an amino acid having different properties, such as naturally-occurring amino acid from a different group (e.g., substituting a charged or hydrophobic amino; acid with alanine), or alternatively, in which a naturally-occurring amino acid is substituted with a non-conventional amino acid. In some embodiments amino acid substitutions are conservative. Also encompassed within the term variant when used with reference to a polynucleotide or polypeptide, refers to a polynucleotide or polypeptide that can vary in primary, secondary, or tertiary structure, as compared to a reference polynucleotide or polypeptide, respectively (e.g., as compared to a wild-type polynucleotide or polypeptide).

[0186] In some aspects, one can use “synthetic variants”, “recombinant variants”, or “chemically modified” polynucleotide variants or polypeptide variants isolated or generated using methods well known in the art. “Modified variants” can include conservative or non-conservative amino acid changes, as described below. Polynucleotide changes can result in amino acid substitutions, additions, deletions, fusions and truncations in the polypeptide encoded by the reference sequence. Some aspects use include insertion variants, deletion variants or substituted variants with substitutions of amino acids, including insertions and substitutions of amino acids and other molecules) that do not normally occur in the peptide sequence that is the basis of the variant, for example but not limited to insertion of ornithine which do not normally occur in human proteins. The term “conservative substitution,” when describing a polypeptide, refers to a change in the amino acid composition of the polypeptide that does not substantially alter the polypeptide's activity. For example, a conservative substitution refers to substituting an amino acid residue for a different amino acid residue that has similar chemical properties (e.g., acidic, basic, positively or negatively charged, polar or nonpolar, etc.). Conservative amino acid substitutions include replacement of a leucine with an isoleucine or valine, an aspartate with a glutamate, or a threonine with a serine. Conservative substitution tables providing functionally similar amino acids are well known in the art. For example, the following six groups each contain amino acids that are conservative substitutions for one another: 1) Alanine (A), Serine (S), Threonine (T); 2) Aspartic acid (D), Glutamic acid (E); 3) Asparagine (N), Glutamine (Q); 4) Arginine (R), Lysine (K); 5) Isoleucine (I), Leucine (L), Methionine (M), Valine (V); and 6) Phenylalanine (F), Tyrosine (Y), Tryptophan (W). (See also Creighton, Proteins, W. H. Freeman and Company (1984), incorporated by reference in its entirety.) In some embodiments, individual substitutions, deletions or additions that alter, add or delete a single amino acid or a small percentage of amino acids can also be considered “conservative substitutions” if the change does not reduce the activity of the peptide. Insertions or deletions are typically in the range of about 1 to 5 amino acids. The choice of conservative amino acids may be selected based on the location of the amino acid to be substituted in the peptide, for example if the amino acid is on the exterior of the peptide and expose to solvents, or on the interior and not exposed to solvents.

[0187] One can select the amino acid that will substitute an existing amino acid based on the location of the existing amino acid, including its exposure to solvents (i.e., if the amino acid is exposed to solvents or is present on the outer surface of the peptide or polypeptide as compared to internally localized amino acids not exposed to solvents). Selection of such conservative amino acid substitutions are well known in the art, for example as disclosed in Dordo et al, J. MoI Biol, 1999, 217, 721-739 and Taylor et al, J. Theor. Biol. 119(1986); 205-218 and S. French and B. Robson, J. Mol. Evol. 19(1983)171. Accordingly, one can select conservative amino acid substitutions suitable for amino acids on the exterior of a protein or peptide (i.e. amino acids exposed to a solvent), for example, but not limited to, the following substitutions can be used: substitution of Y with F, T with S or K, P with A, E with D or Q, N with D or G, R with K, G with N or A, T with S or K, D with N or E, I with L or V, F with Y, S with T or A, R with K, G with N or A, K with R, A with S, K or P.

[0188] In alternative embodiments, one can also select conservative amino acid substitutions encompassed suitable for amino acids on the interior of a protein or peptide, for example one can use suitable conservative substitutions for amino acids is on the interior of a protein or peptide (i.e. the amino acids are not exposed to a solvent), for example but not limited to, one can use the following conservative substitutions: where Y is substituted with F, T with A or S, I with L or V, W with Y, M with L, N with D, G with A, T with A or S, D with N, I with L or V, F with Y or L, S with A or T and A with S, G, T or V. In some embodiments, non-conservative amino acid substitutions are also encompassed within the term of variants.

[0189] The invention includes methods of producing antibodies containing VH and/or VL domain variants of the antibody VH and/or V_{L} domains shown in the appended sequence listing. Such antibodies may be produced by a method comprising

(i) providing, by way of addition, deletion, substitution or insertion of one or more amino acids in the amino acid sequence of a parent antibody V_{H} domain, an antibody V_{H} domain that is an amino acid sequence variant of the parent antibody V_{H} domain,

[0190] wherein the parent antibody V_{H} domain is the V_{H} domain of any of antibodies STIM001, STIM002, STIM002-B, STIM003, STIM004, STIM005, STIM006, STIM007, STIM008 and STIM009 or a V_{H} domain comprising the heavy chain complementarity determining regions of any of those antibodies,

(ii) optionally combining the V_{H} domain thus provided with a V_{L} domain, to provide a VH/VL combination, and
(iii) testing the V_{H} domain or VH/V_{L} domain combination thus provided to identify an antibody with one or more desired characteristics.

[0191] Desired characteristics include binding to human ICOS, binding to mouse ICOS, and binding to other non-human ICOS such as cynomolgus ICOS. Antibodies with comparable or higher affinity for human and/or mouse ICOS may be identified. Other desired characteristics include increasing effector T cell function indirectly, via depletion of immunosuppressive TRegs, or directly, via ICOS signalling activation on T effector cells. Identifying an antibody with a desired characteristic may comprise identifying an antibody with a functional attribute described herein, such as its affinity, cross-reactivity, specificity, ICOS receptor agonism, neutralising potency and/or promotion of T cell dependent killing, any of which may be determined in assays as described herein.

[0192] When V_{L} domains are included in the method, the V_{L} domain may be a V_{L} domain of any of STIM001, STIM002, STIM002-B, STIM003, STIM004, STIM005, STIM006, STIM007, STIM008 or STIM009, or may be a variant provided by way of addition, deletion, substitution or insertion of one or more amino acids in the amino acid sequence of a parent V_{L} domain, wherein the parent V_{L} domain is the V_{L} domain of any of STIM001, STIM002, STIM002-B, STIM003, STIM004, STIM005, STIM006, STIM007, STIM008 and STIM009 or a V_{L} domain comprising the light chain complementarity determining regions of any of those antibodies.

[0193] Methods of generating variant antibodies may optionally comprise producing copies of the antibody or VH/VL domain combination. Methods may further comprise expressing the resultant antibody. It is possible to produce nucleotide sequences corresponding to a desired antibody VH and/or VL domain, optionally in one or more expression vectors.

[0194] Suitable methods of expression, including recombinant expression in host cells, are set out in detail herein.

[0195] 1.6.11. Encoding Nucleic Acids and Methods of Expression

[0196] Isolated nucleic acid may be provided, encoding antibodies according to the present invention. Nucleic acid may be DNA and/or RNA. Genomic DNA, cDNA, mRNA or other RNA, of synthetic origin, or any combination thereof can encode an antibody.

[0197] The present invention provides constructs in the form of plasmids, vectors, transcription or expression cassettes which comprise at least one polynucleotide as above. Exemplary nucleotide sequences are included in the sequence listing. Reference to a nucleotide sequence as set out herein encompasses a DNA molecule with the specified sequence, and encompasses a RNA molecule with the specified sequence in which U is substituted for T, unless context requires otherwise.

[0198] The present invention also provides a recombinant host cell that comprises one or more nucleic acids encoding the antibody. Methods of producing the encoded antibody may comprise expression from the nucleic acid, e.g., by culturing recombinant host cells containing the nucleic acid. The antibody may thus be obtained, and may be isolated and/or purified using any suitable technique, then used as appropriate. A method of production may comprise formulating the product into a composition including at least one additional component, such as a pharmaceutically acceptable excipient.

[0199] Systems for cloning and expression of a polypeptide in a variety of different host cells are well known. Suitable host cells include bacteria, mammalian cells, plant cells, filamentous fungi, yeast and baculovirus systems and transgenic plants and animals.

[0200] The expression of antibodies and antibody fragments in prokaryotic cells is well established in the art. A common bacterial host is E. coli. Expression in eukaryotic cells in culture is also available to those skilled in the art as an option for production. Mammalian cell lines available in the art for expression of a heterologous polypeptide include Chinese hamster ovary (CHO) cells, HeLa cells, baby hamster kidney cells, NSO mouse melanoma cells, YB2/0 rat myeloma cells, human embryonic kidney cells, human embryonic retina cells and many others.

[0201] Vectors may contain appropriate regulatory sequences, including promoter sequences, terminator sequences, polyadenylation sequences, enhancer sequences, marker genes and other sequences as appropriate. Nucleic acid encoding an antibody can be introduced into a host cell. Nucleic acid can be introduced to eukaryotic cells by various methods, including calcium phosphate transfection, DEAE-Dextran, electroporation, liposome-mediated transfection and transduction using retrovirus or other virus, e.g. vaccinia or, for insect cells, baculovirus. Introducing nucleic acid in the host cell, in particular a eukaryotic cell may use a viral or a plasmid based system. The plasmid system may be maintained episomally or may be incorporated into the host cell or into an artificial chromosome. Incorporation may be either by random or targeted integration of one or more copies at single or multiple loci. For bacterial cells, suitable techniques include calcium chloride transformation, electroporation and transfection using bacteriophage. The introduction may be followed by expressing the nucleic acid, e.g., by culturing host cells under conditions for expression of the gene, then optionally isolating or purifying the antibody.

[0202] Nucleic acid of the invention may be integrated into the genome (e.g. chromosome) of the host cell. Integration may be promoted by inclusion of sequences that promote recombination with the genome, in accordance with standard techniques.

[0203] The present invention also provides a method that comprises using nucleic acid described herein in an expression system in order to express an antibody.

[0204] 1.6.12. Therapeutic Use

[0205] An antibody (e.g., a full length antibody or an antigen-binding fragment thereof) described herein may be used in a method of treatment of the human or animal body by therapy. The antibodies find use in increasing effector T cell response, which is of benefit for a range of diseases or conditions, including treating cancers or solid tumours and in the context of vaccination. Increased Teff response may be achieved using an antibody that modulates the balance or ratio between Teffs and Tregs in favour of Teff activity.

[0206] Anti-ICOS antibodies may be used for depleting regulatory T cells and/or increasing effector T cell response in a patient, and may be administered to a patient to treat a disease or condition amenable to therapy by depleting regulatory T cells and/or increasing effector T cell response.

[0207] An antibody of the present invention, or a composition comprising such an antibody molecule or its encoding nucleic acid, may be used or provided for use in any such method. Use of the antibody, or of a composition comprising it or its encoding nucleic acid, for the manufacture of a medicament for use in any such method is also envisaged. The method typically comprises administering the antibody or composition to a mammal. Suitable formulations and methods of administration are described elsewhere herein.

[0208] One envisaged therapeutic use of the antibodies is treatment of cancer. The cancer may be a solid tumour, e.g., renal cell cancer (optionally renal cell carcinoma, e.g., clear cell renal cell carcinoma), head and neck cancer, melanoma (optionally malignant melanoma), non-small cell lung cancer (e.g., adenocarcinoma), bladder cancer, ovarian cancer, cervical cancer, gastric cancer, liver cancer, pancreatic cancer, breast cancer, testicular germ cell carcinoma, or the metastases of a solid tumour such as those listed, or it may be a liquid haematological tumour e.g., lymphoma (such as Hodgkin's lymphoma or Non-Hodgkin's lymphoma, e.g., diffuse large B-cell lymphoma, DLBCL) or leukaemia (e.g., acute myeloid leukaemia). An anti-ICOS antibody may enhance tumour clearance in melanoma, head and neck cancer and non-small cell lung cancer and other cancers with a moderate to high mutational load [26]. In some embodiments, the cancer is breast cancer. In some embodiments, the cancer is triple negative breast cancer. In some embodiments, the cancer is head and neck squamous cell carcinoma. In some embodiments, the cancer is penile cancer. In some embodiments, the cancer is pancreatic cancer. In some embodiments, the cancer is non-small cell lung cancer. In some embodiments, the cancer is hepatocellular carcinoma. In some embodiments, the cancer is esophageal cancer. In some embodiments, the cancer is gastric cancer. In some embodiments, the cancer is melanoma. In some embodiments, the cancer is renal cell carcinoma. In some embodiments, the cancer is cervical cancer. In some embodiments, the cancer is an advanced cancer. In some embodiments, the cancer is a metastatic cancer.

[0209] In some embodiments, treatment with one or more doses of an anti-ICOS antibody or antigen-binding fragment thereof results in a partial anti-tumour response. In some embodiments, treatment with one or more doses of an anti-ICOS antibody or antigen-binding fragment thereof results in a complete anti-tumour response. In some embodiments, treatment with one or more doses of an anti-ICOS antibody or antigen-binding fragment thereof and one or more doses of an anti-PD-L1 antibody or antigen-binding fragment thereof results in a partial anti-tumour response. In some embodiments, treatment with one or more doses of an anti-ICOS antibody or antigen-binding fragment thereof and one or more doses of an anti-PD-L1 antibody or antigen-binding fragment thereof results in a complete anti-tumour response.

[0210] In some embodiments, the anti-ICOS antibody or antigen-binding fragment thereof comprises the CDR sequences of KY1044. In some embodiments, the anti-ICOS antibody or antigen-binding fragment thereof comprises the CDR sequences of KY1044. In some embodiments, the anti-ICOS antibody or antigen-binding fragment thereof comprises the heavy and light chain variable domain sequences of KY1044. In some embodiments, the anti-ICOS antibody or antigen-binding fragment thereof comprises the heavy and light chain sequences of KY1044. In some embodiments, the anti-ICOS antibody is KY1044. In some embodiments, the anti-PD-L1 antibody is atezolizumab. In some embodiments, treatment with KY1044 promotes the efficacy of the anti-PD-L1 antibody (e.g., atezolizumab).

[0211] By enhancing patients' immune response to their neoplastic lesions, immunotherapy using an anti-ICOS antibody offers the prospect of durable cures or long-term remissions, potentially even in the context of late stage disease.

[0212] Cancers are a diverse group of diseases, but anti-ICOS antibodies offer the possibility of treating a range of different cancers by exploiting the patient's own immune system, which has the potential to kill any cancer cell through recognition of mutant or overexpressed epitopes that distinguish cancer cells from normal tissue. By modulating the Teff/Treg balance, anti-ICOS antibodies can enable and/or promote immune recognition and killing of cancer cells. While anti-ICOS antibodies are therefore useful therapeutic agents for a wide variety of cancers, there are particular categories of cancers for which anti-ICOS therapy is especially suited and/or where anti-ICOS therapy can be effective when other therapeutic agents are not.

[0213] One such group is cancer that is positive for expression of ICOS ligand. Cancer cells may acquire expression of ICOS ligand, as has been described for melanoma [27]. Expression of ICOS ligand may provide the cells with a selective advantage as the surface-expressed ligand binds ICOS on Tregs, promoting the expansion and activation of the Tregs and thereby suppressing the immune response against the cancer. Cancer cells expressing ICOS ligand may depend for their survival on this suppression of the immune system by Tregs, and would thus be vulnerable to treatment with anti-ICOS antibodies that target the Tregs. This applies also to cancers derived from cells that naturally express ICOS ligand. Continued expression of ICOS ligand by these cells again provides a survival advantage through immune suppression. A cancer expressing ICOS ligand may be derived from antigen-presenting cells such as B cells, dendritic cells and monocytes and may be a liquid haematological tumour such as those mentioned herein. Interestingly it has been shown that these types of cancer are also high in ICOS and FOXP3 expression (TCGA data)—see Example 6. Example 1 herein demonstrates efficacy of exemplary anti-ICOS antibodies in treating tumours derived from cancerous B cells (A20 syngeneic cells) that express ICOS ligand.

[0214] Accordingly, anti-ICOS antibodies can be used in methods of treating cancers that are positive for expression of ICOS ligand. Further, a cancer to be treated with anti-ICOS antibody according to the present invention may be one that is positive for expression of ICOS and/or FOXP3, and optionally also expresses ICOS ligand.

[0215] Patients may undergo testing to determine whether their cancer is positive for expression of the protein of interest (e.g., ICOS ligand, ICOS and/or FOXP3), for example by taking a test sample (e.g., tumour biopsy) from the patient and determining expression of the protein of interest. Patients whose cancer has been characterised as positive for expression of one, two or all such proteins of interest are selected for treatment with anti-ICOS antibody. As discussed elsewhere herein, anti-ICOS antibody may be used as a monotherapy or in combination with one or more other therapeutic agents.

[0216] Anti-ICOS antibodies also offer hope to patients whose cancers are refractory to treatment with antibodies or other drugs directed to immune checkpoint molecules such as CTLA-4, PD-1, PD-L1, CD137, GITR or CD73. These immunotherapies are effective against some cancers but in some cases a cancer may not respond, or it may become unresponsive to continued treatment with the antibody. In common with antibodies to immune checkpoint inhibitors, anti-ICOS antibodies modulate the patient's immune system—nevertheless an anti-ICOS antibody may succeed where such other antibodies fail. It is shown herein that animals carrying A20 B cell lymphomas could be treated with anti-ICOS antibodies to reduce growth of the tumour, shrink the tumour and indeed clear the tumour from the body, whereas treatment with an anti-PD-L1 antibody was no better than control. The A20 cell line has also been reported to be resistant to anti-CTLA-4 [28].

[0217] Accordingly, anti-ICOS antibodies can be used in methods of treating cancers that are refractory to treatment with one or more immunotherapies, such as (any or all of) an anti-CTLA-4 antibody, anti-PD1 antibody, anti-PD-L1 antibody, anti-CD137 antibody, anti-GITR antibody, or anti-CD73 antibody. A cancer may be characterised as being refractory to treatment with an antibody or other drug if treatment with that antibody or drug does not significantly reduce growth of the cancer, e.g., if a tumour continues to grow or does not reduce in size or if after a response period the tumour re-initiates its growth. Non-response to a therapeutic agent may be determined ex vivo by testing a sample (e.g., tumour biopsy sample) for cancer cell killing or growth inhibition, and/or in the clinical setting by observing (e.g., using an imaging technology, including MRI) that a patient treated with the therapy is not responding to treatment. Patients whose cancer has been characterised as refractory to treatment with such an immunotherapy are selected for treatment with anti-ICOS antibody.

[0218] Further, anti-ICOS antibodies may be used to treat B-cell derived cancer that is resistant to treatment with an anti-CD20 antibody. Anti-ICOS antibodies represent a treatment for cancers that fail to respond to, or become resistant to, therapy with anti-CD20 antibodies like rituximab. Anti-ICOS antibody may be used as a second-line (or further, or additional) treatment for such cancers. The anti-CD20 antibody resistant cancer may be a B cell cancer, e.g., B cell lymphoma, such as diffuse large B cell lymphoma. Resistance of a cancer to anti-CD20 may be determined ex vivo by testing a sample (e.g., tumour biopsy sample) for cancer cell killing or growth inhibition by anti-CD20 antibody, and/or in the clinical setting by observing that a patient treated with the anti-CD20 antibody is not responding to treatment. Alternatively, or additionally, the cancer (e.g., a tumour biopsy sample) may be tested to assess expression of CD20, where an absence or low level of CD20 expression indicates loss of sensitivity to anti-CD20 antibody.

[0219] Samples obtained from patients may thus be tested to determine surface expression of a protein of interest, for example ICOS ligand, ICOS, FOXP3 and/or a target receptor to which another therapeutic agent (e.g., anti-receptor antibody) is directed. The target receptor may be CD20 (to which anti-CD20 antibody therapy such as rituximab is directed), or another receptor such as PD1, EGFR, HER2 or HER3. Surface expression of ICOS ligand, ICOS, FOXP3 and/or lack or loss of surface expression of the target receptor is an indication that the cancer is susceptible to anti-ICOS antibody therapy. Anti-ICOS antibodies can be provided for administration to a patient whose cancer is characterised by surface expression of ICOS ligand, ICOS, FOXP3 and/or lack or loss of surface expression of a target receptor, optionally where the patient has been previously treated with anti-CTLA4, anti-PD1, anti-PD-L1 or with an antibody to the target receptor and has not responded or has stopped responding to treatment with that antibody, as measured for example by continued or renewed cancer cell growth, e.g., increase in tumour size.

[0220] Any suitable method may be employed to determine whether cancer cells test positive for surface expression of a protein such as ICOS ligand, CD20 or other target receptors mentioned herein. A typical method is immunohistochemistry, where a sample of the cells (e.g., a tumour biopsy sample) is contacted with an antibody for the protein of interest, and binding of antibody is detected using a labelled reagent—typically a second antibody that recognises the Fc region of the first antibody and carries a detectable label such as a fluorescent marker. A sample may be declared to test positive where at least 5% of cells are labelled, as visualised by cell staining or other detection of the label. Optionally a higher cut-off such as 10% or 25% may be used. The antibody will generally be used in excess. Reagent antibodies to the molecules of interest are available or may be generated by straightforward methods. To test for ICOS ligand, the antibody MAB1651 is currently available from R&D systems as a mouse IgG that recognises human ICOS ligand. To test for CD20 expression, rituximab may be used. Detection of mRNA levels of the ICOS ligand or target receptor of interest is an alternative technique [27].

[0221] A further indication that a tumour will respond to treatment with anti-ICOS antibody is the presence of Tregs in the tumour microenvironment. Activated Tregs are characterised by ICOS-high and Foxp3-high surface expression. The presence of Tregs in a tumour, especially in elevated numbers, provides a further basis on which a patient may be selected for treatment with anti-ICOS antibody. Tregs may be detected in a tumour biopsy sample ex vivo, for example by immunohistochemistry (assaying for co-expression of both Foxp3 and ICOS, using antibodies to the target protein followed by detection of labels, as described above) or by single cell dispersion of the sample for use in FACS with labelled antibodies to ICOS and Foxp3.

[0222] The anti-ICOS antibodies may be used for treating cancers associated with infectious agents, such as virally-induced cancers. In this category are head and neck squamous cell carcinoma, cervical cancer, Merkel cell carcinoma and many others. Viruses associated with cancer include HBV, HCV, HPV (cervical cancer, oropharyngeal cancer), and EBV (Burkitts lymphomas, gastric cancer, Hodgkin's lymphoma, other EBV positive B cell lymphomas, nasopharyngeal carcinoma and post transplant lymphoproliferative disease). The International Agency for Research on Cancer (Monograph 100B) identified the following major cancer sites associated with infectious agents:
[0223] Stomach/Gastric: Heliobacter pylori
[0224] Liver: Hepatitis B virus, hepatitis C virus (HCV), Opisthorchis viverrini, Clonorchis sinensis
[0225] Cervix uteri: Human papillomavirus (HPV) with or without HIV
[0226] Anogenital (penile, vulva, vagina, anus): HPV with or without HIV
[0227] Nasopharynx: Epstein-Barr virus (EBV)
[0228] Oropharynx: HPV with or without tobacco or alcohol consumption
[0229] Kaposi's sarcoma: Human herpes virus type 8 with or without HIV
[0230] Non-Hodgkin lymphoma: H. pylori, EBV with or without HIV, HCV, human T-cell lymphotropic virus type 1
[0231] Hodgkin's lymphoma: EBV with or without HIV
[0232] Bladder: Schistosoma haematobium.

[0233] Antibodies according to the present invention may be used for treating cancer associated with or induced by any of these infectious agents, such as the cancers specified above.

[0234] Stimulation of effector T cell response can also contribute to immunity against infectious disease and/or to recovery from infectious disease in a patient. Thus, an anti-ICOS antibody may be used for treating infectious disease by administering the antibody to a patient.

[0235] Infectious diseases include those caused by pathogens, e.g., bacterial, fungal, viral or protozoal pathogens, and treatment may be to promote immune response in a patient against the pathogen infection. An example of a bacterial pathogen is tuberculosis. Examples of viral pathogens are hepatitis B and HIV. Examples of protozoal pathogens are Plasmodium species, which cause malaria, such as P. falciparum.

[0236] The antibody may be used for treating infections, e.g., infection by any pathogen mentioned herein. Infection may be persistent or chronic infection. Infection may be localised or systemic. Extended contact between a pathogen and the immune system may lead to exhaustion of the immune system or development of tolerance (manifested for example through increased levels of Tregs, and tipping of the Treg:Teff balance in favour of Tregs) and/or to immune evasion by the pathogen, through evolution and modification of displayed pathogen antigens. These features reflect similar processes that are believed to occur in cancer. Anti-ICOS antibodies present a therapeutic approach to treating infection by a pathogen, e.g., chronic infection, through modulation of the Treg:Teff ratio in favour of Teff and/or other effects described herein.

[0237] Treatment may be of patients who have been diagnosed as having an infectious disease or an infection. Alternatively, treatment may be preventative, and administered to a patient to guard against contracting a disease, e.g., as a vaccine, as described elsewhere herein.

[0238] It has also been proposed that an immune response, particularly an IFNγ-dependent systemic immune response, could be beneficial for treatment of Alzheimer's disease and other CNS pathologies that share a neuroinflammatory component as part [29].

[0239] WO2015/136541 proposed treatment of Alzheimer's disease using an anti-PD-1 antibody. Anti-ICOS antibodies may be used in the treatment of Alzheimer's disease or other neurodegenerative diseases, optionally in combination with one or more other immunomodulators (e.g., antibody to PD-1).

[0240] 1.6.13. Combination Therapy

[0241] Treatment with an immunomodulatory antibody such as anti-CTLA4, anti-PD1 or anti-PDL1, especially one with Fc effector function, may create an environment in which further depletion of ICOS highly expressing immune-suppressive cells is beneficial. It may be advantageous to combine an anti-ICOS antibody with such an immunomodulator to enhance its therapeutic effects.

[0242] A patient who has been treated with an immunomodulatory antibody (e.g., anti-PDL-1, anti-PD-1, anti-CTLA-4) may particularly benefit from treatment with an anti-ICOS antibody. One reason for this is that an immunomodulatory antibody may increase the number of ICOS-positive Tregs (e.g., intratumoural Tregs) in the patient. This effect is also observed with certain other therapeutic agents, such as recombinant IL-2. Anti-ICOS antibody may reduce and/or reverse a surge or rise in ICOS+ Tregs (e.g., intratumoural Tregs) resulting from treatment of the patient with another therapeutic agent. A patient selected for treatment with an anti-ICOS antibody may thus be one who has already received treatment with a first therapeutic agent, the first therapeutic agent being an antibody (e.g., immunomodulator antibody) or other agent (e.g., IL-2) that increases the number of ICOS+ Tregs in the patient.

[0243] Immunomodulators with which an anti-ICOS antibody may be combined include antibodies to any of: PDL1 (e.g., avelumab), PD-1 (e.g., pembrolizumab or nivolumab) or CTLA-4 (e.g., ipilimumab or tremelimumab). An anti-ICOS antibody may be combined with pidilizumab. In other embodiments, an anti-ICOS antibody is not administered in combination with anti-CTLA-4 antibody, and/or optionally is administered in combination with a therapeutic antibody that is not an anti-CTLA-4 antibody.

[0244] For example, an anti-ICOS antibody may be used in combination therapy with an anti-PDL1 antibody. Preferably, the anti-ICOS antibody is one that mediates ADCC, ADCP and/or CDC. Preferably, the anti-PDL1 antibody is one that mediates ADCC, ADCP and/or CDC. An example of such combination therapy is administration of an anti-ICOS antibody with an anti-PDL1 antibody wherein both antibodies have effector positive constant regions. Thus, the anti-ICOS antibody and the anti-PDL1 antibody may both be able to mediate ADCC, CDC and/or ADCP. Fc effector function and selection of constant regions is described in detail elsewhere herein, but as one example an anti-ICOS human IgG1 may be combined with an anti-PD-L1 human IgG1. The anti-ICOS antibody and/or the anti-PD-L1 antibody may comprise a wild type human IgG1 constant region. Alternatively, the effector positive constant region of an antibody may be one that is engineered for enhanced effector function, e.g., enhanced CDC, ADCC and/or ADCP. Example antibody constant regions, including wild type human IgG1 sequences and mutations that alter effector function, are discussed in detail elsewhere herein.

[0245] Anti-PDL1 antibodies with which an anti-ICOS antibody may be combined include:
[0246] Anti-PDL1 antibody that inhibits binding of PD-1 to PDL1 and/or inhibits PDL1, optionally as effector positive human IgG1;
[0247] Anti-PD-1 antibody that inhibits binding of PD-1 to PDL1 and/or PDL2;
[0248] Avelumab, a human IgG1 antibody which inhibits PD-1 binding to PDL-1. See WO2013/079174;
[0249] Durvalumab (or “MEDI4736”), a variant human IgG1 antibody having mutations L234A, L235A and 331. See WO2011/066389;
[0250] Atezolizumab, a variant human IgG1 antibody having mutations N297A, D356E and L358M. See US2010/0203056;
[0251] BMS-936559, a human IgG4 antibody comprising mutation S228P. See WO2007/005874.

[0252] In some embodiments, the anti-PD-L1 antibody comprises atezolizumab. In some embodiments, the anti-PD-L1 antibody is atezolizumab.

[0253] Numerous further examples of anti-PD-L1 antibodies are disclosed herein and others are known in the art. Characterisation data for many of the anti-PD-L1 antibodies mentioned here has been published in U.S. Pat. Nos. 9,567,399 and 9,617,338, both incorporated by reference herein. Example anti-PD-L1 antibodies have VH and/or VL domains comprising the HCDRs and/or LCDRs of any of 1D05, 84G09, 1D05 HC mutant 1, 1D05 HC mutant 2, 1D05 HC mutant 3, 1D05 HC mutant 4, 1D05 LC mutant 1, 1D05 LC mutant 2, 1D05 LC mutant 3, 411B08, 411C04, 411D07, 385F01, 386H03, 389A03, 413D08, 413G05, 413F09, 414B06 or 416E01 as set out in U.S. Pat. No. 9,567,399 or 9,617,338. The antibody may comprise the VH and VL domain of any of these antibodies, and may optionally comprise a heavy and/or light chain having the heavy and/or light chain amino acid sequence of any of these antibodies. VH and VL domains of these anti-PD-L1 antibodies are further described elsewhere herein.

[0254] Further example anti-PD-L1 antibodies have VH and/or VL domains comprising the HCDRs and/or LCDRs of KN-035, CA-170, FAZ-053, M7824, ABBV-368, LY-3300054, GNS-1480, YW243.55.S70, REGN3504, or of an anti-PD-L1 antibody disclosed in any of WO2017/034916, WO2017/020291, WO2017/020858, WO2017/020801, WO2016/111645, WO2016/197367, WO2016/061142, WO2016/149201, WO2016/000619, WO2016/160792, WO2016/022630, WO2016/007235, WO2015/179654, WO2015/173267, WO2015/181342, WO2015/109124, WO2015/112805, WO2015/061668, WO2014/159562, WO2014/165082, WO2014/100079, WO2014/055897, WO2013/181634, WO2013/173223, WO2013/079174, WO2012/145493, WO2011/066389, WO2010/077634, WO2010/036959, WO2010/089411 and WO2007/005874. The antibody may comprise the VH and VL domain of any of these antibodies, and may optionally comprise a heavy and/or light chain having the heavy and/or light chain amino acid sequence of any of these antibodies. The anti-ICOS antibody which is used in combination therapy with anti-PD-L1 may be an antibody of the present invention as disclosed herein. Alternatively, the anti-ICOS antibody may comprise the CDRs of, or a VH and/or VL domain of, an anti-ICOS antibody disclosed in any of the following publications: WO2016154177, US2016304610—for example any of antibodies 7F12, 37A10, 35A9, 36E10, 16G10, 37A10S713, 37A10S714, 37A10S715, 37A10S716, 37A10S717, 37A10S718, 16G10S71, 16G10S72, 16G10S73, 16G10S83, 35A9S79, 35A9S710, or 35A9S89; WO16120789, US2016215059—for example the antibody known as 422.2 and/or H2L5;

WO14033327, EP2892928, US2015239978—for example the antibody known as 314-8 and/or produced from hybridoma CNCM 1-4180;
WO12131004, EP2691419, U.S. Pat. No. 9,376,493, US20160264666—for example the antibody Icos145-1 and/or antibody produced by hybridoma CNCM 1-4179;
WO10056804—for example the antibody JMAb 136 or “136”;
WO9915553, EP1017723B1, U.S. Pat. Nos. 7,259,247, 7,132,099, 7,125,551, 7,306,800, 7,722,872, WO05103086, EP1740617, U.S. Pat. No. 8,318,905, 8,916,155—for example the antibody MIC-944 or 9F3;
WO983821, U.S. Pat. No. 7,932,358B2, US2002156242, EP0984023, EP1502920, U.S. Pat. Nos. 7,030,225, 7,045,615, 7,279,560, 7,226,909, 7,196,175, 7,932,358, 8,389,690, WO02070010, EP1286668, EP1374901, U.S. Pat. Nos. 7,438,905, 7,438,905, WO0187981, EP1158004, U.S. Pat. Nos. 6,803,039, 7,166,283, 7,988,965, WO0115732, EP1125585, U.S. Pat. No. 7,465,445, 7,998,478—for example any JMAb antibody, e.g., any of JMAb-124, JMAb-126, JMAb-127, JMAb-128, JMAb-135, JMAb-136, JMAb-137, JMAb-138, JMAb-139, JMAb-140, JMAb-141, e.g., JMAb136;
WO2014/089113—for example antibody 17G9;

### WO12174338;

### US2016145344;

[0255] WO11020024, EP2464661, US2016002336, US2016024211, U.S. Pat. No. 8,840,889;
U.S. Pat. No. 8,497,244.

[0256] The anti-ICOS antibody optionally comprises the CDRs of 37A10S713 as disclosed in WO2016154177. It may comprise the VH and VL domains of 37A10S713, and may optionally have the antibody heavy and light chains of 37A10S713.

[0257] Combination of an anti-ICOS antibody with an immunomodulator may provide an increased therapeutic effect compared with monotherapy, and may allow therapeutic benefit to be achieved with a lower dose of the immunomodulator(s). Thus, for example, an antibody (e.g., anti-PD-L1 antibody, optionally ipilimumab or atezolizumab) that is used in combination with anti-ICOS antibody may be dosed at 3 mg/kg rather than a more usual dose of 10 mg/kg. The administration regimen of the anti-PD-L1 antibody or other antibody may involve intravenous administration over a 90 minute period every 3 weeks for a total of 4 doses.

[0258] An anti-ICOS antibody may be used to increase the sensitivity of a tumour to treatment with an anti-PD-L1 antibody, which may be recognised as a reduction in the dose at which the anti-PD-L1 antibody exerts a therapeutic benefit. Thus, anti-ICOS antibody may be administered to a patient to reduce the dose of anti-PD-L1 antibody effective to treat cancer or a tumour in the patient. Administration of anti-ICOS antibody may reduce the recommended or required dosage of anti-PD-L1 antibody administration to that patient to, for example, 75%, 50%, 25%, 20%, 10% or less, compared with the dosage when anti-PD-L1 antibody is administered without anti-ICOS. The patient may be treated by administration of anti-ICOS antibody and anti-PD-L1 antibody in a combination therapy as described herein.

[0259] The benefit of combining anti-PD-L1 with anti-ICOS may extend to a reduction in dosage of each agent when compared with its use as a monotherapy. Anti-PD-L1 antibody may be used to reduce the dose at which anti-ICOS antibody exerts a therapeutic benefit, and thus may be administered to a patient to reduce the dose of anti-ICOS antibody effective to treat cancer or a tumour in the patient. Thus, an anti-PD-L1 antibody may reduce the recommended or required dosage of anti-ICOS antibody administration to that patient to, for example, 75%, 50%, 25%, 20%, 10% or less, compared with the dosage when anti-ICOS antibody is administered without anti-PD-L1. The patient may be treated by administration of anti-ICOS antibody and anti-PD-L1 antibody in a combination therapy as described herein.

[0260] As discussed elsewhere herein, treatment with anti-PD-L1 antibody, especially antibody with effector positive Fc, appears not to increase the expression of ICOS on Teff cells. This is advantageous when administering such antibodies in combination with effector positive anti-ICOS antibodies, where an increase in ICOS expression on Teffs would undesirably render these cells more sensitive to depletion by the anti-ICOS antibody. In a combination with anti-PD-L1, anti-ICOS therapy may thus exploit a differential expression of ICOS on Teffs compared with Tregs, preferentially targeting the ICOS-high Tregs for depletion. This in turn relieves the suppression of TEffs and has a net effect of promoting the effector T cell response in a patient. The effect of targeting immune checkpoint molecules on expression of ICOS on T cells has also been studied previously—see Figure S6C in ref [30] (supplementary materials), where treatment with CTLA-4 antibody and/or anti-PD-1 antibody was reported to increase the percentage of CD4+ Tregs expressing ICOS. The effect of a therapeutic agent on ICOS expression in Tregs and Teffs may be a factor in selection of appropriate agents for use in combination with anti-ICOS antibodies, noting that effect of the anti-ICOS antibody may be enhanced under conditions where there is high differential expression of ICOS on Tregs versus Teffs.

[0261] As described herein, a single dose of anti-ICOS antibody may be sufficient to provide therapeutic effect, especially in combination with other therapeutic agents such as anti-PD-L1 antibody. In tumour therapy, the underlying rationale for this single dose benefit may be that the anti-ICOS antibody mediates its effect, at least in part, by resetting or altering the microenvironment of the tumour sufficiently to render the tumour more sensitive to immune attack and/or to the effects of other immunomodulators such as those mentioned. Tumour microenviroment resetting is triggered through for example depletion of ICOS positive tumour infiltrating T-regs. So, for example, a patient may be treated with a single dose of an anti-ICOS antibody followed by one or multiple doses of anti-PD-L1 antibody. Over a period of treatment, for example six months or a year, the anti-ICOS antibody may be administered in a single dose while other agents, e.g., anti-PD-L1 antibody, are optionally administered multiple times over that treatment period, preferably with at least one such dose being administered subsequent to treatment with the anti-ICOS antibody.

[0262] Further examples of combination therapy include combination of anti-ICOS antibody with:
[0263] an antagonist of an adenosine A2A receptor (“A2AR inhibitor”);
[0264] a CD137 agonist (e.g., agonist antibody);
[0265] an antagonist of the enzyme indoleamine-2,3 dioxygenase, which catalyses the breakdown of tryptophan (“IDO inhibitor”). IDO is an immune checkpoint, activated in dendritic cells and macrophages, which contributes to immune suppression/tolerance.

[0266] Anti-ICOS antibodies may be used in combination therapy with IL-2 (e.g., recombinant IL-2 such as aldesleukin). The IL-2 may be administered at high dose (HD). Typical HD IL-2 therapy involves bolus infusion of over 500,000 IU/kg, e.g., bolus infusions of 600,000 or 720,000 IU/kg, per cycle of therapy, where 10-15 such bolus infusions are given at intervals of between 5-10 hours, e.g., up to 15 bolus infusions every 8 hours, and repeating the therapy cycle approximately every 14 to 21 days for up to 6 to 8 cycles. HD IL-2 therapy has been successful in treating tumours, especially melanoma (e.g., metastatic melanoma) and renal cell carcinoma, but its use is limited to the high toxicity of IL-2 which can cause severe adverse effects.

[0267] Treatment with high dose IL-2 has been shown to increase the population of ICOS-positive Tregs in cancer patients [31]. This increase in ICOS+ TRegs following the first cycle of HD IL-2 therapy was reported to correlate with worse clinical outcome—the higher the number of ICOS+ Tregs, the worse the prognosis. An IL-2 variant F42K has been proposed as an alternative therapy to avoid this undesirable increase in ICOS+ Treg cells [32]. However, another approach would be to exploit the increase in ICOS+T regs by using an antibody in accordance with the present invention as a second-line therapeutic agent.

[0268] It may be beneficial to combine IL-2 therapy with anti-ICOS antibodies, capitalising on the ability of anti-ICOS antibodies to target TRegs that highly express ICOS, inhibiting these cells and improving the prognosis for patients undergoing IL-2 therapy. Concomitant administration of IL-2 and anti-ICOS antibody may increase the response rate while avoiding or reducing adverse events in the treated patient population. The combination may permit IL-2 to be used at lower dose compared with IL-2 monotherapy, reducing the risk or level of adverse events arising from the IL-2 therapy, while retaining or enhancing clinical benefit (e.g., reduction of tumour growth, clearance of solid tumour and/or reduction of metastasis). In this way, addition of anti-ICOS can improve treatment of patients who are receiving IL-2, whether high-dose (HD) or low-dose (LD) IL-2.

[0269] Accordingly, one aspect of the invention provides a method of treating a patient by administering an anti-ICOS antibody to the patient, wherein the patient is also treated with IL-2, e.g., HD IL-2. Another aspect of the invention is an anti-ICOS antibody for use in treating a patient, wherein the patient is also treated with IL-2, e.g., HD IL-2. The anti-ICOS antibody may be used as a second-line therapy. Thus, the patient may be one who has been treated with IL-2, e.g., having received at least one cycle of HD IL-2 therapy, and who has an increased level of ICOS+ Tregs. Assays may be performed on samples of cancer cells, e.g., tumour biopsy samples, using immunohistochemistry or FACS as described elsewhere herein to detect cells positive for ICOS, Foxp3, ICOSL and optionally one or more further markers of interest. Methods may comprise determining that the patient has an increased level of ICOS+ Tregs (e.g., in peripheral blood, or in a tumour biopsy) following IL-2 treatment, where an increased level is indicative that the patient would benefit from treatment with the anti-ICOS antibody. The increase in Tregs may be relative to control (untreated) individuals or to the patient prior to IL-2 therapy. Such patients with elevated Tregs represent a group who may not benefit from continued IL-2 treatment alone, but for whom a combination of anti-ICOS antibody and IL-2 therapy, or treatment with anti-ICOS antibody alone, offers therapeutic benefit. Thus, following a positive determination that the patient has an increased level of ICOS+ Tregs, anti-ICOS antibody and/or further IL-2 therapy may be administered. Treatment with the anti-ICOS antibody may selectively target and deplete the ICOS+ Tregs relative to other T cell populations in such patients. This provides a therapeutic effect by relieving the immunosuppression mediated by these cells and thereby enhancing activity of Teffs against the target cells, e.g., tumour cells or infected cells.

[0270] Combination therapy with anti-ICOS antibodies and IL-2 may be used for any therapeutic indication described herein, and particularly for treating a tumour, e.g., melanoma such as metastatic melanoma, or renal cell carcinoma. Thus, in one example, the patient treated with an anti-ICOS antibody is one who presents with metastatic melanoma and has been treated with IL-2, e.g., HD IL-2 therapy or LD IL-2 therapy.

[0271] In general, where an anti-ICOS antibody is administered to a patient who has received treatment with a first therapeutic agent (e.g., immunomodulator antibody) or other agent (e.g., IL-2), the anti-ICOS antibody may be administered after a minimum period of, for example, 24 hours, 48 hours, 72 hours, 1 week or 2 weeks following administration of the first therapeutic agent. The anti-ICOS antibody may be administered within 2, 3, 4 or 5 weeks after administration of the first therapeutic agent. This does not exclude additional administrations of either agent at any time, although it may be desirable to minimise the number of treatments administered, for ease of compliance for patients and to reduce costs. Rather, the relative timing of the administrations will be selected to enhance their combined effect, the first therapeutic agent creating an immunological environment (e.g., elevated ICOS+ Tregs, or antigen release as discussed below) in which the effect of the anti-ICOS antibody is especially advantageous. Thus, sequential administration of the first therapeutic agent and then the anti-ICOS antibody may allow time for the first agent to act, creating in vivo conditions in which the anti-ICOS antibody can exhibit its enhanced effect. Various administration regimens, including simultaneous or sequential combination treatments, are described herein and can be utilised as appropriate. Where the first therapeutic agent is one that increases the number of ICOS+ Tregs in the patient, the treatment regimen for the patient may comprise determining that the patient has an increased number of ICOS+ Tregs, and then administering the anti-ICOS antibody.

[0272] As noted, use of anti-ICOS antibodies in combination therapy may provide advantages of reducing the effective dose of the therapeutic agents and/or countering adverse effects of therapeutic agents that increase ICOS+ Tregs in patients. Yet further therapeutic benefits may be achieved through selecting a first therapeutic agent that causes release of antigens from target cells through “immunological cell death”, and administering the first therapeutic agent in combination with an anti-ICOS antibody. As noted, administration of the anti-ICOS antibody may sequentially follow administration of the first therapeutic agent, administration of the two agents being separated by a certain time window as discussed above.

[0273] Immunological cell death is a recognised mode of cell death, contrasting with apoptosis. It is characterised by release of ATP and HMGB1 from the cell and exposure of calreticulin on the plasma membrane [33, 34].

[0274] Immunological cell death in a target tissue or in target cells promotes engulfment of the cell by an antigen-presenting cell, resulting in display of antigens from the target cell, which in turn induces antigen-specific Teff cells. Anti-ICOS antibody may increase the magnitude and/or duration of the Teff response by acting as an agonist of ICOS on the Teff cells. In addition, where the anti-ICOS antibody is Fc effector function enabled (e.g., a human IgG1 antibody), the anti-ICOS antibody may cause depletion of antigen-specific Tregs. Thus, through a combination of either or both of these effects, the balance between Teff and Treg cells is modulated in favour of enhancing Teff activity. Combination of an anti-ICOS antibody with a treatment that induces immunological cell death in a target tissue or cell type, such as in a tumour or in cancer cells, thereby promotes an immune response in the patient against the target tissue or cells, representing a form of vaccination in which the vaccine antigen is generated in vivo.

[0275] Accordingly, one aspect of the invention is a method of treating cancer in a patient by in vivo vaccination of the patient against their cancer cells. Another aspect of the invention is an anti-ICOS antibody for use in such a method. Anti-ICOS antibodies may be used in a method comprising:
[0276] treating the patient with a therapy that causes immunological cell death of the cancer cells, resulting in presentation of antigen to antigen-specific effector T cells, and
[0277] administering an anti-ICOS antibody to the patient, wherein the anti-ICOS antibody enhances the antigen-specific effector T cell response against the cancer cells.

[0278] Treatments that induce immunological cell death include radiation (e.g., ionising irradiation of cells using UVC light or γ rays), chemotherapeutic agents (e.g., oxaliplatin, anthracyclines such as doxorubicin, idarubicin or mitoxantrone, BK channel agonists such as phloretin or pimaric acid, bortezomib, cardiac glycosides, cyclophosphamide, GADD34/PP1 inhibitors with mitomycin, PDT with hypericin, polyinosinic-polycytidylic acid, 5-fluorouracil, gemcitabine, gefitnib, erlotinib, or thapsigargin with cisplatin) and antibodies to tumour-associated antigens. The tumour-associated antigen can be any antigen that is overexpressed by tumour cells relative to non-tumour cells of the same tissue, e.g., HER2, CD20, EGFR. Suitable antibodies include herceptin (anti-HER2), rituximab (anti-CD20), or cetuximab (anti-EGFR).

[0279] Thus, in some embodiments, it is advantageous to combine an anti-ICOS antibody with one or more such treatments. Optionally, the anti-ICOS antibody is adminstered to a patient who has already received such treatment. The anti-ICOS antibody may be administered after a period of, for example, 24 hours, 48 hours, 72 hours, 1 week or 2 weeks following the treatment that induces immunological cell death, e.g., between 24 to 72 hours after the treatment. The anti-ICOS antibody may be administered within 2, 3, 4 or 5 weeks after the treatment. Other regimens for combination therapy are discussed elsewhere herein.

[0280] While “in vivo vaccination” has been described above, it is also possible to treat tumour cells to induce immunological cell death ex vivo, after which the cells may be reintroduced to the patient. Rather than administering the agent or treatment that induces immunological cell death directly to the patient, the treated tumour cells are administered to the patient. Treatment of the patient may be in accordance with administration regimens described above.

[0281] As already noted, a single dose of an anti-ICOS antibody may be sufficient to provide therapeutic benefit. Thus, in the methods of treatment described herein, the anti-ICOS antibody is optionally administered as a single dose. A single dose of anti-ICOS antibody may deplete Tregs in a patient, with consequent beneficial effects in diseases such as cancer. It has previously been reported that transient ablation of Tregs has anti-tumour effects, including reducing tumour progression, treating established tumours and metastases and extending survival, and that it can enhance the therapeutic effect of tumour irradiation [35]. Administration of a single dose of anti-ICOS may provide such Treg depletion, and may be used to enhance the effects of other therapeutic approaches used in combination, such as radiotherapy.

[0282] 1.6.14. Antibodies to PD-L1

[0283] An antibody to PD-L1 for use in combination with an anti-ICOS antibody, whether as a separate therapeutic agent or in a multispecific antibody as described herein, may comprise the antigen-binding site of any anti-PD-L1 antibody. Numerous examples of anti-PD-L1 antibodies are disclosed herein and others are known in the art. Characterisation data for many of the anti-PD-L1 antibodies mentioned here has been published in U.S. Pat. Nos. 9,567,399 and 9,617,338, both incorporated by reference herein.

[0284] 1D05 has a heavy chain variable region (V_{H}) amino acid sequence of Seq ID No:33, comprising the CDRH1 amino acid sequence of Seq ID No:27 (IMGT) or Seq ID No:30 (Kabat), the CDRH2 amino acid sequence of Seq ID No:28 (IMGT) or Seq ID No:31 (Kabat), and the CDRH3 amino acid sequence of Seq ID No:29 (IMGT) or Seq ID No:32 (Kabat). The heavy chain nucleic acid sequence of the V_{H} domain is Seq ID No:34. 1D05 has a light chain variable region (V_{L}) amino acid sequence of Seq ID No:43, comprising the CDRL1 amino acid sequence of Seq ID No:37 (IMGT) or Seq ID No:40 (Kabat), the CDRL2 amino acid sequence of Seq ID No:38 (IMGT) or Seq ID No:41 (Kabat), and the CDRL3 amino acid sequence of Seq ID No:39 (IMGT) or Seq ID No:42 (Kabat). The light chain nucleic acid sequence of the V_{L} domain is Seq ID No:44. The V_{H} domain may be combined with any of the heavy chain constant region sequences described herein, e.g. Seq ID No:193, Seq ID No:195, Seq ID No:197, Seq ID No:199, Seq ID No:201, Seq ID No:203, Seq ID No:205, Seq ID No:340, Seq ID No:524, Seq ID No: 526, Seq ID No:528, Seq ID No: 530, Seq ID No: 532 or Seq ID No: 534. The V_{L} domain may be combined with any of the light chain constant region sequences described herein, e.g. Seq ID Nos:207, 209, 211, 213, 215, 217, 219, 221, 223, 225, 227, 229, 231, 233, 235, 237, 536 and 538. A full length heavy chain amino acid sequence is Seq ID No:35 (heavy chain nucleic acid sequence Seq ID No:36). A full length light chain amino acid sequence is Seq ID No:45 (light chain nucleic acid sequence Seq ID No:46).

[0285] 84G09 has a heavy chain variable (V_{H}) region amino acid sequence of Seq ID No:13, comprising the CDRH1 amino acid sequence of Seq ID No:7 (IMGT) or Seq ID No:10 (Kabat), the CDRH2 amino acid sequence of Seq ID No:8 (IMGT) or Seq ID No:11 (Kabat), and the CDRH3 amino acid sequence of Seq ID No:9 (IMGT) or Seq ID No:12 (Kabat). The heavy chain nucleic acid sequence of the V_{H} domain is Seq ID No:14. 84G09 has a light chain variable region (V_{L}) amino acid sequence of Seq ID No:23, comprising the CDRL1 amino acid sequence of Seq ID No:17 (IMGT) or Seq ID No:20 (Kabat), the CDRL2 amino acid sequence of Seq ID No:18 (IMGT) or Seq ID No:21 (Kabat), and the CDRL3 amino acid sequence of Seq ID No:19 (IMGT) or Seq ID No:22 (Kabat). The light chain nucleic acid sequence of the V_{L} domain is Seq ID No:24. The V_{H} domain may be combined with any of the heavy chain constant region sequences described herein, e.g. Seq ID No:193, Seq ID No:195, Seq ID No:197, Seq ID No:199, Seq ID No:201, Seq ID No:203, Seq ID No:205, Seq ID No:340, Seq ID No:524, Seq ID No:526, Seq ID No:528, Seq ID No:530, Seq ID No:532 or Seq ID No:534. The V_{L} domain may be combined with any of the light chain constant region sequences described herein, e.g. Seq ID Nos:207, 209, 211, 213, 215, 217, 219, 221, 223, 225, 227, 229, 231, 233, 235, 237, 536 and 538. A full length heavy chain amino acid sequence is Seq ID No:15 (heavy chain nucleic acid sequence Seq ID No:16). A full length light chain amino acid sequence is Seq ID No:25 (light chain nucleic acid sequence Seq ID No:26).

[0286] 1D05 HC mutant 1 has a heavy chain variable (V_{H}) region amino acid sequence of Seq ID No:47, comprising the CDRH1 amino acid sequence of Seq ID No:27 (IMGT) or Seq ID No:30 (Kabat), the CDRH2 amino acid sequence of Seq ID No:28 (IMGT) or Seq ID No:31 (Kabat), and the CDRH3 amino acid sequence of Seq ID No:29 (IMGT) or Seq ID No:32 (Kabat). 1D05 HC mutant 1 has a light chain variable region (V_{L}) amino acid sequence of Seq ID No:43, comprising the CDRL1 amino acid sequence of Seq ID No:37 (IMGT) or Seq ID No:40 (Kabat), the CDRL2 amino acid sequence of Seq ID No:38 (IMGT) or Seq ID No:41 (Kabat), and the CDRL3 amino acid sequence of Seq ID No:39 (IMGT) or Seq ID No:42 (Kabat). The light chain nucleic acid sequence of the V_{L} domain is Seq ID No:44. The V_{H} domain may be combined with any of the heavy chain constant region sequences described herein, e.g. Seq ID No:193, Seq ID No:195, Seq ID No:197, Seq ID No:199, Seq ID No:201, Seq ID No:203, Seq ID No:205, Seq ID No:340, Seq ID No:524, Seq ID No:526, Seq ID No:528, Seq ID No:530, Seq ID No:532 or Seq ID No:534. The V_{L} domain may be combined with any of the light chain constant region sequences described herein, e.g. Seq ID Nos:207, 209, 211, 213, 215, 217, 219, 221, 223, 225, 227, 229, 231, 233, 235, 237, 536 and 538. A full length light chain amino acid sequence is Seq ID No:45 (light chain nucleic acid sequence Seq ID No:46).

[0287] 1D05 HC mutant 2 has a heavy chain variable (V_{H}) region amino acid sequence of Seq ID No:48, comprising the CDRH1 amino acid sequence of Seq ID No:27 (IMGT) or Seq ID No:30 (Kabat), the CDRH2 amino acid sequence of Seq ID No:28 (IMGT) or Seq ID No:31 (Kabat), and the CDRH3 amino acid sequence of Seq ID No:29 (IMGT) or Seq ID No:32 (Kabat). 1D05 HC mutant 2 has a light chain variable region (V_{L}) amino acid sequence of Seq ID No:43, comprising the CDRL1 amino acid sequence of Seq ID No:37 (IMGT) or Seq ID No:40 (Kabat), the CDRL2 amino acid sequence of Seq ID No:38 (IMGT) or Seq ID No:41 (Kabat), and the CDRL3 amino acid sequence of Seq ID No:39 (IMGT) or Seq ID No:42 (Kabat). The light chain nucleic acid sequence of the V_{L} domain is Seq ID No:44. The V_{H} domain may be combined with any of the heavy chain constant region sequences described herein, e.g. Seq ID No:193, Seq ID No:195, Seq ID No:197, Seq ID No:199, Seq ID No:201, Seq ID No:203, Seq ID No:205, Seq ID No:340, Seq ID No:524, Seq ID No:526, Seq ID No:528, Seq ID No:530, Seq ID No:532 or Seq ID No:534. The V_{L} domain may be combined with any of the light chain constant region sequences described herein, e.g. Seq ID Nos:207, 209, 211, 213, 215, 217, 219, 221, 223, 225, 227, 229, 231, 233, 235, 237, 536 and 538. A full length light chain amino acid sequence is Seq ID No:45 (light chain nucleic acid sequence Seq ID No:46).

[0288] 1D05 HC mutant 3 has a heavy chain variable (V_{H}) region amino acid sequence of Seq ID No:49, comprising the CDRH1 amino acid sequence of Seq ID No:27 (IMGT) or Seq ID No:30 (Kabat), the CDRH2 amino acid sequence of Seq ID No:28 (IMGT) or Seq ID No:31 (Kabat), and the CDRH3 amino acid sequence of Seq ID No:29 (IMGT) or Seq ID No:32 (Kabat). 1D05 HC mutant 3 has a light chain variable region (V_{L}) amino acid sequence of Seq ID No:43, comprising the CDRL1 amino acid sequence of Seq ID No:37 (IMGT) or Seq ID No:40 (Kabat), the CDRL2 amino acid sequence of Seq ID No:38 (IMGT) or Seq ID No:41 (Kabat), and the CDRL3 amino acid sequence of Seq ID No:39 (IMGT) or Seq ID No:42 (Kabat). The light chain nucleic acid sequence of the V_{L} domain is Seq ID No:44. The V_{H} domain may be combined with any of the heavy chain constant region sequences described herein, e.g. Seq ID No:193, Seq ID No:195, Seq ID No:197, Seq ID No:199, Seq ID No:201, Seq ID No:203, Seq ID No:205, Seq ID No:340, Seq ID No:524, Seq ID No:526, Seq ID No:528, Seq ID No:530, Seq ID No:532 or Seq ID No:534. The V_{L} domain may be combined with any of the light chain constant region sequences described herein, e.g. Seq ID Nos:207, 209, 211, 213, 215, 217, 219, 221, 223, 225, 227, 229, 231, 233, 235, 237, 536 and 538. A full length light chain amino acid sequence is Seq ID No:45 (light chain nucleic acid sequence Seq ID No:46).

[0289] 1D05 HC mutant 4 has a heavy chain variable (V_{H}) region amino acid sequence of Seq ID No:342, comprising the CDRH1 amino acid sequence of Seq ID No:27 (IMGT) or Seq ID No:30 (Kabat), the CDRH2 amino acid sequence of Seq ID No:28 (IMGT) or Seq ID No:31 (Kabat), and the CDRH3 amino acid sequence of Seq ID No:29 (IMGT) or Seq ID No:32 (Kabat). 1D05 HC mutant 4 has a light chain variable region (V_{L}) amino acid sequence of Seq ID No:43, comprising the CDRL1 amino acid sequence of Seq ID No:37 (IMGT) or Seq ID No:40 (Kabat), the CDRL2 amino acid sequence of Seq ID No:38 (IMGT) or Seq ID No:41 (Kabat), and the CDRL3 amino acid sequence of Seq ID No:39 (IMGT) or Seq ID No:42 (Kabat). The light chain nucleic acid sequence of the V_{L} domain is Seq ID No:44. The V_{H} domain may be combined with any of the heavy chain constant region sequences described herein, e.g. Seq ID No:193, Seq ID No:195, Seq ID No:197, Seq ID No:199, Seq ID No:201, Seq ID No:203, Seq ID No:205, Seq ID No:340, Seq ID No:524, Seq ID No:526, Seq ID No:528, Seq ID No:530, Seq ID No:532 or Seq ID No:534. The V_{L} domain may be combined with any of the light chain constant region sequences described herein, e.g. Seq ID Nos:207, 209, 211, 213, 215, 217, 219, 221, 223, 225, 227, 229, 231, 233, 235, 237, 536 and 538. A full length light chain amino acid sequence is Seq ID No:45 (light chain nucleic acid sequence Seq ID No:46).

[0290] 1D05 LC mutant 1 has a heavy chain variable (V_{H}) region amino acid sequence of Seq ID No:33, comprising the CDRH1 amino acid sequence of Seq ID No:27 (IMGT) or Seq ID No:30 (Kabat), the CDRH2 amino acid sequence of Seq ID No:28 (IMGT) or Seq ID No:31 (Kabat), and the CDRH3 amino acid sequence of Seq ID No:29 (IMGT) or Seq ID No:32 (Kabat). The heavy chain nucleic acid sequence of the V_{H} domain is Seq ID No:34.

[0291] 1D05 LC mutant 1 has a light chain variable region (V_{L}) amino acid sequence of Seq ID No:50, comprising the CDRL1 amino acid sequence of Seq ID No:37 (IMGT) or Seq ID No:40 (Kabat), and the CDRL3 amino acid sequence of Seq ID No:39 (IMGT) or Seq ID No:42 (Kabat). The CDRL2 sequence of 1D05 LC Mutant 1 is as defined by the Kabat or IMGT systems from the V_{L} sequence of Seq ID No:50. The V_{H} domain may be combined with any of the heavy chain constant region sequences described herein, e.g. Seq ID No:193, Seq ID No:195, Seq ID No:197, Seq ID No:199, Seq ID No:201, Seq ID No:203, Seq ID No:205 or Seq ID No:340, Seq ID No:524, Seq ID No:526, Seq ID No:528, Seq ID No:530, Seq ID No:532 or Seq ID No:534. The V_{L} domain may be combined with any of the light chain constant region sequences described herein, e.g. Seq ID Nos:207, 209, 211, 213, 215, 217, 219, 221, 223, 225, 227, 229, 231, 233, 235, 237, 536 and 538. A full length heavy chain amino acid sequence is Seq ID No:35 (heavy chain nucleic acid sequence Seq ID No:36).

[0292] 1D05 LC mutant 2 has a heavy chain variable (V_{H}) region amino acid sequence of Seq ID No:33, comprising the CDRH1 amino acid sequence of Seq ID No:27 (IMGT) or Seq ID No:30 (Kabat), the CDRH2 amino acid sequence of Seq ID No:28 (IMGT) or Seq ID No:31 (Kabat), and the CDRH3 amino acid sequence of Seq ID No:29 (IMGT) or Seq ID No:32 (Kabat). The heavy chain nucleic acid sequence of the V_{H} domain is Seq ID No:34.

[0293] 1D05 LC mutant 2 has a light chain variable region (V_{L}) amino acid sequence of Seq ID No:51, comprising the CDRL1 amino acid sequence of Seq ID No:37 (IMGT) or Seq ID No:40 (Kabat), the CDRL2 amino acid sequence of Seq ID No:38 (IMGT) or Seq ID No:41 (Kabat), and the CDRL3 amino acid sequence of Seq ID No:39 (IMGT) or Seq ID No:42 (Kabat). The V_{H} domain may be combined with any of the heavy chain constant region sequences described herein, e.g. Seq ID No:193, Seq ID No:195, Seq ID No:197, Seq ID No:199, Seq ID No:201, Seq ID No:203, Seq ID No:205, Seq ID No:340, Seq ID No:524, Seq ID No:526, Seq ID No:528, Seq ID No:530, Seq ID No:532 or Seq ID No:534. The V_{L} domain may be combined with any of the light chain constant region sequences described herein, e.g. Seq ID Nos:207, 209, 211, 213, 215, 217, 219, 221, 223, 225, 227, 229, 231, 233, 235, 237, 536 and 538. A full length heavy chain amino acid sequence is Seq ID No:35 (heavy chain nucleic acid sequence Seq ID No:36).

[0294] 1D05 LC mutant 3 has a heavy chain variable (V_{H}) region amino acid sequence of Seq ID No:33, comprising the CDRH1 amino acid sequence of Seq ID No:27 (IMGT) or Seq ID No:30 (Kabat), the CDRH2 amino acid sequence of Seq ID No:28 (IMGT) or Seq ID No:31 (Kabat), and the CDRH3 amino acid sequence of Seq ID No:29 (IMGT) or Seq ID No:32 (Kabat). The heavy chain nucleic acid sequence of the V_{H} domain is Seq ID No:34. 1D05 LC mutant 3 has a light chain variable region (V_{L}) amino acid sequence of Seq ID No:298, comprising the CDRL1 amino acid sequence of Seq ID No:37 (IMGT) or Seq ID No:40 (Kabat), and the CDRL3 amino acid sequence of Seq ID No:39 (IMGT) or Seq ID No:42 (Kabat). The CDRL2 sequence of 1D05 LC Mutant 3 is as defined by the Kabat or IMGT systems from the V_{L} sequence of Seq ID No:298. The light chain nucleic acid sequence of the V_{L} domain is Seq ID No:44. The V_{H} domain may be combined with any of the heavy chain constant region sequences described herein, e.g. Seq ID No:193, Seq ID No:195, Seq ID No:197, Seq ID No:199, Seq ID No:201, Seq ID No:203, Seq ID No:205 or Seq ID No:340, Seq ID No:524, Seq ID No:526, Seq ID No:528, Seq ID No:530, Seq ID No:532 or Seq ID No:534. The V_{L} domain may be combined with any of the light chain constant region sequences described herein, e.g. Seq ID Nos:207, 209, 211, 213, 215, 217, 219, 221, 223, 225, 227, 229, 231, 233, 235, 237, 536 and 538. A full length heavy chain amino acid sequence is Seq ID No:35 (heavy chain nucleic acid sequence Seq ID No:36). A full length light chain amino acid sequence is Seq ID No:45 (light chain nucleic acid sequence Seq ID No:46). 411B08 has a heavy chain variable (V_{H}) region amino acid sequence of Seq ID No:58, comprising the CDRH1 amino acid sequence of Seq ID No:52 (IMGT) or Seq ID No:55 (Kabat), the CDRH2 amino acid sequence of Seq ID No:53 (IMGT) or Seq ID No:56 (Kabat), and the CDRH3 amino acid sequence of Seq ID No:54 (IMGT) or Seq ID No:57 (Kabat). The heavy chain nucleic acid sequence of the V_{H} domain is Seq ID No:59. 411B08 has a light chain variable region (V_{L}) amino acid sequence of Seq ID No:68, comprising the CDRL1 amino acid sequence of Seq ID No:62 (IMGT) or Seq ID No:65 (Kabat), the CDRL2 amino acid sequence of Seq ID No:63 (IMGT) or Seq ID No:66 (Kabat), and the CDRL3 amino acid sequence of Seq ID No:64 (IMGT) or Seq ID No:67 (Kabat). The light chain nucleic acid sequence of the V_{L} domain is Seq ID No:69. The V_{H} domain may be combined with any of the heavy chain constant region sequences described herein, e.g. Seq ID No:193, Seq ID No:195, Seq ID No:197, Seq ID No:199, Seq ID No:201, Seq ID No:203, Seq ID No:205, Seq ID No:340, Seq ID No:524, Seq ID No:526, Seq ID No:528, Seq ID No:530, Seq ID No:532 or Seq ID No:534. The V_{L} domain may be combined with any of the light chain constant region sequences described herein, e.g. Seq ID Nos:207, 209, 211, 213, 215, 217, 219, 221, 223, 225, 227, 229, 231, 233, 235, 237, 536 and 538. A full length heavy chain amino acid sequence is Seq ID No:60 (heavy chain nucleic acid sequence Seq ID No:61). A full length light chain amino acid sequence is Seq ID No:70 (light chain nucleic acid sequence Seq ID No:71).

[0295] 411C04 has a heavy chain variable (V_{H}) region amino acid sequence of Seq ID No:78, comprising the CDRH1 amino acid sequence of Seq ID No:72 (IMGT) or Seq ID No:75 (Kabat), the CDRH2 amino acid sequence of Seq ID No:73 (IMGT) or Seq ID No:76 (Kabat), and the CDRH3 amino acid sequence of Seq ID No:74 (IMGT) or Seq ID No:77 (Kabat). The heavy chain nucleic acid sequence of the V_{H} domain is Seq ID No:79. 411C04 has a light chain variable region (V_{L}) amino acid sequence of Seq ID No:88, comprising the CDRL1 amino acid sequence of Seq ID No:82 (IMGT) or Seq ID No:85 (Kabat), the CDRL2 amino acid sequence of Seq ID No:83 (IMGT) or Seq ID No:86 (Kabat), and the CDRL3 amino acid sequence of Seq ID No:84 (IMGT) or Seq ID No:87 (Kabat). The light chain nucleic acid sequence of the V_{L} domain is Seq ID No:89. The V_{H} domain may be combined with any of the heavy chain constant region sequences described herein, e.g. Seq ID No:193, Seq ID No:195, Seq ID No:197, Seq ID No:199, Seq ID No:201, Seq ID No:203, Seq ID No:205, Seq ID No:340, Seq ID No:524, Seq ID No:526, Seq ID No:528, Seq ID No:530, Seq ID No:532 or Seq ID No:534. The V_{L} domain may be combined with any of the light chain constant region sequences described herein, e.g. Seq ID Nos:207, 209, 211, 213, 215, 217, 219, 221, 223, 225, 227, 229, 231, 233, 235, 237, 536 and 538. A full length heavy chain amino acid sequence is Seq ID No:80 (heavy chain nucleic acid sequence Seq ID No:81). A full length light chain amino acid sequence is Seq ID No:90 (light chain nucleic acid sequence Seq ID No:91).

[0296] 411D07 has a heavy chain variable (V_{H}) region amino acid sequence of Seq ID No:98, comprising the CDRH1 amino acid sequence of Seq ID No:92 (IMGT) or Seq ID No:95 (Kabat), the CDRH2 amino acid sequence of Seq ID No:93 (IMGT) or Seq ID No:96 (Kabat), and the CDRH3 amino acid sequence of Seq ID No:94 (IMGT) or Seq ID No:97 (Kabat). The heavy chain nucleic acid sequence of the V_{H} domain is Seq ID No:99. 411D07 has a light chain variable region (V_{L}) amino acid sequence of Seq ID No:108, comprising the CDRL1 amino acid sequence of Seq ID No:102 (IMGT) or Seq ID No:105 (Kabat), the CDRL2 amino acid sequence of Seq ID No:103 (IMGT) or Seq ID No:106 (Kabat), and the CDRL3 amino acid sequence of Seq ID No:104 (IMGT) or Seq ID No:107 (Kabat). The light chain nucleic acid sequence of the VL domain is Seq ID No:109. The V_{H} domain may be combined with any of the heavy chain constant region sequences described herein, e.g. Seq ID No:193, Seq ID No:195, Seq ID No:197, Seq ID No:199, Seq ID No:201, Seq ID No:203, Seq ID No:205, Seq ID No:340, Seq ID No:524, Seq ID No:526, Seq ID No:528, Seq ID No:530, Seq ID No:532 or Seq ID No:534. The V_{L} domain may be combined with any of the light chain constant region sequences described herein, e.g. Seq ID Nos:207, 209, 211, 213, 215, 217, 219, 221, 223, 225, 227, 229, 231, 233, 235, 237, 536 and 538. A full length heavy chain amino acid sequence is Seq ID No:100 (heavy chain nucleic acid sequence Seq ID No:101). A full length light chain amino acid sequence is Seq ID No: 110 (light chain nucleic acid sequence Seq ID No:111).

[0297] 385F01 has a heavy chain variable (V_{H}) region amino acid sequence of Seq ID No:118, comprising the CDRH1 amino acid sequence of Seq ID No:112 (IMGT) or Seq ID No:115 (Kabat), the CDRH2 amino acid sequence of Seq ID No:113 (IMGT) or Seq ID No:116 (Kabat), and the CDRH3 amino acid sequence of Seq ID No:114 (IMGT) or Seq ID No:117 (Kabat). The heavy chain nucleic acid sequence of the V_{H} domain is Seq ID No:119. 385F01 has a light chain variable region (V_{L}) amino acid sequence of Seq ID No:128, comprising the CDRL1 amino acid sequence of Seq ID No:122 (IMGT) or Seq ID No:125 (Kabat), the CDRL2 amino acid sequence of Seq ID No:123 (IMGT) or Seq ID No:126 (Kabat), and the CDRL3 amino acid sequence of Seq ID No:124 (IMGT) or Seq ID No:127 (Kabat). The light chain nucleic acid sequence of the VL domain is Seq ID No:129. The V_{H} domain may be combined with any of the heavy chain constant region sequences described herein, e.g. Seq ID No:193, Seq ID No:195, Seq ID No:197, Seq ID No:199, Seq ID No:201, Seq ID No:203, Seq ID No:205, Seq ID No:340, Seq ID No:524, Seq ID No:526, Seq ID No:528, Seq ID No:530, Seq ID No:532 or Seq ID No:534. The V_{L} domain may be combined with any of the light chain constant region sequences described herein, e.g. Seq ID Nos:207, 209, 211, 213, 215, 217, 219, 221, 223, 225, 227, 229, 231, 233, 235, 237, 536 and 538. A full length heavy chain amino acid sequence is Seq ID No:120 (heavy chain nucleic acid sequence Seq ID No:121). A full length light chain amino acid sequence is Seq ID No:130 (light chain nucleic acid sequence Seq ID No:131).

[0298] 386H03 has a heavy chain variable (V_{H}) region amino acid sequence of Seq ID No:158, comprising the CDRH1 amino acid sequence of Seq ID No:152 (IMGT) or Seq ID No:155 (Kabat), the CDRH2 amino acid sequence of Seq ID No:153 (IMGT) or Seq ID No:156 (Kabat), and the CDRH3 amino acid sequence of Seq ID No:154 (IMGT) or Seq ID No:157 (Kabat). The heavy chain nucleic acid sequence of the V_{H} domain is Seq ID No:159. 386H03 has a light chain variable region (V_{L}) amino acid sequence of Seq ID No:168, comprising the CDRL1 amino acid sequence of Seq ID No:162 (IMGT) or Seq ID No:165 (Kabat), the CDRL2 amino acid sequence of Seq ID No:163 (IMGT) or Seq ID No:166 (Kabat), and the CDRL3 amino acid sequence of Seq ID No:164 (IMGT) or Seq ID No:167 (Kabat). The light chain nucleic acid sequence of the VL domain is Seq ID No:169. The V_{H} domain may be combined with any of the heavy chain constant region sequences described herein, e.g. Seq ID No:193, Seq ID No:195, Seq ID No:197, Seq ID No:199, Seq ID No:201, Seq ID No:203, Seq ID No:205, Seq ID No:340, Seq ID No:524, Seq ID No:526, Seq ID No:528, Seq ID No:530, Seq ID No:532 or Seq ID No:534. The V_{L} domain may be combined with any of the light chain constant region sequences described herein, e.g. Seq ID Nos:207, 209, 211, 213, 215, 217, 219, 221, 223, 225, 227, 229, 231, 233, 235, 237, 536 and 538. A full length heavy chain amino acid sequence is Seq ID No:160 (heavy chain nucleic acid sequence Seq ID No:161). A full length light chain amino acid sequence is Seq ID No:170 (light chain nucleic acid sequence Seq ID No:171).

[0299] 389A03 has a heavy chain variable (V_{H}) region amino acid sequence of Seq ID No:178, comprising the CDRH1 amino acid sequence of Seq ID No:172 (IMGT) or Seq ID No:175 (Kabat), the CDRH2 amino acid sequence of Seq ID No:173 (IMGT) or Seq ID No:176 (Kabat), and the CDRH3 amino acid sequence of Seq ID No:174 (IMGT) or Seq ID No:177 (Kabat). The heavy chain nucleic acid sequence of the V_{H} domain is Seq ID No:179. 389A03 has a light chain variable region (V_{L}) amino acid sequence of Seq ID No:188, comprising the CDRL1 amino acid sequence of Seq ID No:182 (IMGT) or Seq ID No:185 (Kabat), the CDRL2 amino acid sequence of Seq ID No:183 (IMGT) or Seq ID No:186 (Kabat), and the CDRL3 amino acid sequence of Seq ID No:184 (IMGT) or Seq ID No:187 (Kabat). The light chain nucleic acid sequence of the VL domain is Seq ID No:189. The V_{H} domain may be combined with any of the heavy chain constant region sequences described herein, e.g. Seq ID No:193, Seq ID No:195, Seq ID No:197, Seq ID No:199, Seq ID No:201, Seq ID No:203, Seq ID No:205, Seq ID No:340, Seq ID No:524, Seq ID No:526, Seq ID No:528, Seq ID No:530, Seq ID No:532 or Seq ID No:534. The V_{L} domain may be combined with any of the light chain constant region sequences described herein, e.g. Seq ID Nos:207, 209, 211, 213, 215, 217, 219, 221, 223, 225, 227, 229, 231, 233, 235, 237, 536 and 538. A full length heavy chain amino acid sequence is Seq ID No:180 (heavy chain nucleic acid sequence Seq ID No:181). A full length light chain amino acid sequence is Seq ID No:190 (light chain nucleic acid sequence Seq ID No:191).

[0300] 413D08 has a heavy chain variable (V_{H}) region amino acid sequence of Seq ID No:138, comprising the CDRH1 amino acid sequence of Seq ID No:132 (IMGT) or Seq ID No:135 (Kabat), the CDRH2 amino acid sequence of Seq ID No:133 (IMGT) or Seq ID No:136 (Kabat), and the CDRH3 amino acid sequence of Seq ID No:134 (IMGT) or Seq ID No:137 (Kabat). The heavy chain nucleic acid sequence of the V_{H} domain is Seq ID No:139. 413D08 has a light chain variable region (V_{L}) amino acid sequence of Seq ID No:148, comprising the CDRL1 amino acid sequence of Seq ID No:142 (IMGT) or Seq ID No:145 (Kabat), the CDRL2 amino acid sequence of Seq ID No:143 (IMGT) or Seq ID No:146 (Kabat), and the CDRL3 amino acid sequence of Seq ID No:144 (IMGT) or Seq ID No:147 (Kabat). The light chain nucleic acid sequence of the VL domain is Seq ID No:149. The V_{H} domain may be combined with any of the heavy chain constant region sequences described herein, e.g. Seq ID No:193, Seq ID No:195, Seq ID No:197, Seq ID No:199, Seq ID No:201, Seq ID No:203, Seq ID No:205, Seq ID No:340, Seq ID No:524, Seq ID No:526, Seq ID No:528, Seq ID No:530, Seq ID No:532 or Seq ID No:534. The V_{L} domain may be combined with any of the light chain constant region sequences described herein, e.g. Seq ID Nos:207, 209, 211, 213, 215, 217, 219, 221, 223, 225, 227, 229, 231, 233, 235, 237, 536 and 538. A full length heavy chain amino acid sequence is Seq ID No: 140 (heavy chain nucleic acid sequence Seq ID No:141). A full length light chain amino acid sequence is Seq ID No:150 (light chain nucleic acid sequence Seq ID No:151).

[0301] 413G05 has a heavy chain variable (V_{H}) region amino acid sequence of Seq ID No:244, comprising the CDRH1 amino acid sequence of Seq ID No:238 (IMGT) or Seq ID No:241 (Kabat), the CDRH2 amino acid sequence of Seq ID No:239 (IMGT) or Seq ID No:242 (Kabat), and the CDRH3 amino acid sequence of Seq ID No:240 (IMGT) or Seq ID No:243 (Kabat). The heavy chain nucleic acid sequence of the V_{H} domain is Seq ID No:245. 413G05 has a light chain variable region (V_{L}) amino acid sequence of Seq ID No:254, comprising the CDRL1 amino acid sequence of Seq ID No:248 (IMGT) or Seq ID No:251 (Kabat), the CDRL2 amino acid sequence of Seq ID No:249 (IMGT) or Seq ID No:252 (Kabat), and the CDRL3 amino acid sequence of Seq ID No:250 (IMGT) or Seq ID No:253 (Kabat). The light chain nucleic acid sequence of the VL domain is Seq ID No:255. The V_{H} domain may be combined with any of the heavy chain constant region sequences described herein, e.g. Seq ID No:193, Seq ID No:195, Seq ID No:197, Seq ID No:199, Seq ID No:201, Seq ID No:203, Seq ID No:205, Seq ID No:340, Seq ID No:524, Seq ID No:526, Seq ID No:528, Seq ID No:530, Seq ID No:532 or Seq ID No:534. The V_{L} domain may be combined with any of the light chain constant region sequences described herein, e.g. Seq ID Nos:207, 209, 211, 213, 215, 217, 219, 221, 223, 225, 227, 229, 231, 233, 235, 237, 536 and 538. A full length heavy chain amino acid sequence is Seq ID No:246 (heavy chain nucleic acid sequence Seq ID No:247). A full length light chain amino acid sequence is Seq ID No:256 (light chain nucleic acid sequence Seq ID No:257).

[0302] 413F09 has a heavy chain variable (V_{H}) region amino acid sequence of Seq ID No:264, comprising the CDRH1 amino acid sequence of Seq ID No:258 (IMGT) or Seq ID No:261 (Kabat), the CDRH2 amino acid sequence of Seq ID No:259 (IMGT) or Seq ID No:262 (Kabat), and the CDRH3 amino acid sequence of Seq ID No:260 (IMGT) or Seq ID No:263 (Kabat). The heavy chain nucleic acid sequence of the V_{H} domain is Seq ID No:265. 413F09 has a light chain variable region (V_{L}) amino acid sequence of Seq ID No:274, comprising the CDRL1 amino acid sequence of Seq ID No:268 (IMGT) or Seq ID No:271 (Kabat), the CDRL2 amino acid sequence of Seq ID No:269 (IMGT) or Seq ID No:272 (Kabat), and the CDRL3 amino acid sequence of Seq ID No:270 (IMGT) or Seq ID No:273 (Kabat). The light chain nucleic acid sequence of the VL domain is Seq ID No:275. The V_{H} domain may be combined with any of the heavy chain constant region sequences described herein, e.g. Seq ID No:193, Seq ID No:195, Seq ID No:197, Seq ID No:199, Seq ID No:201, Seq ID No:203, Seq ID No:205, Seq ID No:340, Seq ID No:524, Seq ID No:526, Seq ID No:528, Seq ID No:530, Seq ID No:532 or Seq ID No:534. The V_{L} domain may be combined with any of the light chain constant region sequences described herein, e.g. Seq ID Nos:207, 209, 211, 213, 215, 217, 219, 221, 223, 225, 227, 229, 231, 233, 235, 237, 536 and 538. A full length heavy chain amino acid sequence is Seq ID No:266 (heavy chain nucleic acid sequence Seq ID No:267). A full length light chain amino acid sequence is Seq ID No:276 (light chain nucleic acid sequence Seq ID No:277).

[0303] 414B06 has a heavy chain variable (V_{H}) region amino acid sequence of Seq ID No:284, comprising the CDRH1 amino acid sequence of Seq ID No:278 (IMGT) or Seq ID No:281 (Kabat), the CDRH2 amino acid sequence of Seq ID No:279 (IMGT) or Seq ID No:282 (Kabat), and the CDRH3 amino acid sequence of Seq ID No:280 (IMGT) or Seq ID No:283 (Kabat). The heavy chain nucleic acid sequence of the V_{H} domain is Seq ID No:285. 414B06 has a light chain variable region (V_{L}) amino acid sequence of Seq ID No:294, comprising the CDRL1 amino acid sequence of Seq ID No:288 (IMGT) or Seq ID No:291(Kabat), the CDRL2 amino acid sequence of Seq ID No:289 (IMGT) or Seq ID No:292 (Kabat), and the CDRL3 amino acid sequence of Seq ID No:290 (IMGT) or Seq ID No:293 (Kabat). The light chain nucleic acid sequence of the VL domain is Seq ID No:295. The V_{H} domain may be combined with any of the heavy chain constant region sequences described herein, e.g. Seq ID No:193, Seq ID No:195, Seq ID No:197, Seq ID No:199, Seq ID No:201, Seq ID No:203, Seq ID No:205, Seq ID No:340, Seq ID No:524, Seq ID No:526, Seq ID No:528, Seq ID No:530, Seq ID No:532 or Seq ID No:534. The V_{L} domain may be combined with any of the light chain constant region sequences described herein, e.g. Seq ID Nos:207, 209, 211, 213, 215, 217, 219, 221, 223, 225, 227, 229, 231, 233, 235, 237, 536 and 538. A full length heavy chain amino acid sequence is Seq ID No:286 (heavy chain nucleic acid sequence Seq ID No:287). A full length light chain amino acid sequence is Seq ID No:296 (light chain nucleic acid sequence Seq ID No:297).

[0304] 416E01 has a heavy chain variable region (V_{H}) amino acid sequence of Seq ID No:349, comprising the CDRH1 amino acid sequence of Seq ID No:343 (IMGT) or Seq ID No:346 (Kabat), the CDRH2 amino acid sequence of Seq ID No:344 (IMGT) or Seq ID No:347 (Kabat), and the CDRH3 amino acid sequence of Seq ID No:345 (IMGT) or Seq ID No:348 (Kabat). The heavy chain nucleic acid sequence of the V_{H} domain is Seq ID No:350. 416E01 has a light chain variable region (V_{L}) amino acid sequence of Seq ID No:359, comprising the CDRL1 amino acid sequence of Seq ID No:353 (IMGT) or Seq ID No:356 (Kabat), the CDRL2 amino acid sequence of Seq ID No:354 (IMGT) or Seq ID No:357 (Kabat), and the CDRL3 amino acid sequence of Seq ID No:355 (IMGT) or Seq ID No:358 (Kabat). The light chain nucleic acid sequence of the VL domain is Seq ID No:360. The V_{H} domain may be combined with any of the heavy chain constant region sequences described herein, e.g. Seq ID No:193, Seq ID No:195, Seq ID No:197, Seq ID No:199, Seq ID No:201, Seq ID No:203, Seq ID No:205, Seq ID No:340, Seq ID No:524, Seq ID No:526, Seq ID No:528, Seq ID No:530, Seq ID No:532 or Seq ID No:534. The V_{L} domain may be combined with any of the light chain constant region sequences described herein, e.g. Seq ID Nos:207, 209, 211, 213, 215, 217, 219, 221, 223, 225, 227, 229, 231, 233, 235, 237, 536 and 538. A full length heavy chain amino acid sequence is Seq ID No:351 (heavy chain nucleic acid sequence Seq ID No:352). A full length light chain amino acid sequence is Seq ID No:361 (light chain nucleic acid sequence Seq ID No:362).

[0305] In some embodiments, the anti-PD-L1 antibody comprises atezolizumab. In some embodiments, the anti-PD-L1 antibody is atezolizumab.

[0306] 1.6.15. Antibody-Drug Conjugates

[0307] Anti-ICOS antibodies can be used as carriers of cytotoxic agents, to target Tregs. Tregs located in the tumour microenvironment (TME) strongly express ICOS (see U.S. Pat. No. 9,957,323). ICOS is more strongly expressed on intratumoural Tregs than on intratumoural Teffs or peripheral Tregs. Thus, anti-ICOS antibodies labelled with a toxic drug or pro-drug may preferentially target Tregs in the TME to deliver the toxic payload, selectively inhibiting those cells. Such targeting of cytotoxic agents provides an additional route to removing the immune suppressive effect of Tregs, thereby altering the Treg:Teff balance in favour of Teff activity and may be used as an alternative to, or in combination with, any one or more of the other therapeutic approaches discussed herein (e.g., Fc effector-mediated inhibition of Tregs, agonism of effector T cells).

[0308] Accordingly, the invention provides an anti-ICOS antibody that is conjugated to a cytotoxic drug or pro-drug. In the case of a pro-drug, the pro-drug is activatable in the TME or other target site of therapeutic activity to generate the cytotoxic agent. Activation may be in response to a trigger such as photoactivation, e.g., using near-infrared light to activate a photoabsorber conjugate [36]. Spatially-selective activation of a pro-drug further enhances the cytotoxic effect of the antibody-drug conjugate, combining with the high ICOS expression on intratumoural Tregs to provide a cytotoxic effect that is highly selective for these cells.

[0309] For use in an antibody-drug conjugate, the cytotoxic drug or pro-drug is preferably non-immunogenic and non-toxic (dormant or inactive) during circulation of the antibody-drug conjugate in the blood. Preferably the cytotoxic drug (or the pro-drug, when activated) is potent—e.g., two to four molecules of the drug may be sufficient to kill the target cell. A photoactivatable pro-drug is silicapthalocyanine dye (IRDye 700 DX), which induces lethal damage to the cell membrane after near-infrared light exposure. Cytotoxic drugs include anti-mitotic agents such as monomethyl auristatin E and microtubule inhibitors such as maytansine derivatives, e.g., mertansine, DM1, emtansine.

[0310] Conjugation of the drug (or pro-drug) to the antibody will usually be via a linker. The linker may be a cleavable linker, e.g., disulphide, hydrazone or peptide link. Cathepsin-cleavable linkers may be used, so that the drug is released by cathepsin in tumour cells. Alternatively, non-cleavable linkers can be used, e.g., thioether linkage. Additional attachment groups and/or spacers may also be included.

[0311] The antibody in the antibody-drug conjugate may be an antibody fragment, such as Fab′2 or other antigen-binding fragment as described herein, as the small size of such fragments may assist penetration to the tissue site (e.g., solid tumour).

[0312] An anti-ICOS antibody according to the present invention may be provided as an immunocytokine. Anti-ICOS antibodies may also be administered with immunocytokines in combination therapy. A number of examples of antibodies are described herein for use in combination therapy with anti-ICOS, and any of these (e.g., an anti-PD-L1 antibody) may be provided as immunocytokines for use in the present invention. An immunocytokine comprises an antibody molecule conjugated to a cytokine, such as IL-2. Anti-ICOS:IL-2 conjugates and anti-PD-L1:IL-2 conjugates are thus further aspects of the present invention.

[0313] An IL-2 cytokine may have activity at the high (αβγ) affinity IL-2 receptor and/or the intermediate affinity (αβ) IL-2 receptor. IL-2 as used in an immunocytokine may be human wild type IL-2 or a variant IL-2 cytokine having one or more amino acid deletions, substitutions or additions, e.g., IL-2 having a 1 to 10 amino acid deletion at the N-terminus. Other IL-2 variants include mutations R38A or R38Q.

[0314] An example anti-PD-L1 immunocytokine comprises an immunoglobulin heavy chain and an immunoglobulin light chain, wherein the heavy chain comprises in N- to C-terminal direction:
[0315] a) A V_{H} domain comprising CDRH1, CDRH2 and CDRH3; and
[0316] b) A heavy chain constant region;

[0317] and wherein the light chain comprises in N- to C-terminal direction:
[0318] c) A V_{L} domain comprising CDRL1, CDRL2 and CDRL3;
[0319] d) A light chain constant region, (C_{L});
[0320] e) Optionally, a linker, (L); and
[0321] f) An IL-2 cytokine;

[0322] wherein the V_{H} domain and V_{L} domain are comprised by an antigen-binding site that specifically binds to human PD-L1; and

[0323] wherein the immunocytokine comprises a V_{H} domain which comprises a CDRH3 comprising the motif X₁GSGX₂YGX₃X₄FD (SEQ ID NO: 609), wherein X₁, X₂ and X₃ are independently any amino acid, and X₄ is either present or absent, and if present, may be any amino acid.

[0324] The VH and VL domain may be the VH and VL domain of any anti-PD-L1 antibody mentioned herein, e.g., the 1D05 VH and VL domains.

[0325] The IL-2 may be human wild type or variant IL-2.

### 1.6.16. Vaccination

[0326] Anti-ICOS antibodies may be provided in vaccine compositions or co-administered with vaccines preparations. ICOS is involved in T follicular helper cell formation and the germinal centre reaction [37]. Agonist ICOS antibodies thus have potential clinical utility as molecular adjuvants to enhance vaccine efficacy. The antibodies may be used to increase protective efficacy of numerous vaccines, such as those against hepatitis B, malaria, HIV.

[0327] In the context of vaccination, the anti-ICOS antibody will generally be one that lacks Fc effector function, and thus does not mediate ADCC, CDC or ADCP. The antibody may be provided in a format lacking an Fc region, or having an effector null constant region. Optionally, an anti-ICOS antibody may have a heavy chain constant region that binds one or more types of Fc receptor but does not induce ADCC, CDC or ADCP activity, or that exhibits lower ADCC, CDC and ADCP activity compared with wild type human IgG1. Such a constant region may be unable to bind, or may bind with lower affinity, the particular Fc receptor(s) responsible for triggering ADCC, CDC or ADCP activity. Alternatively, where cellular effector functions are acceptable or desirable in the context of the vaccination, the anti-ICOS antibody may comprise a heavy chain constant region that is Fc effector function positive. Any of IgG1, IgG4 and IgG4.PE formats may for instance be used for anti-ICOS antibodies in vaccination regimens, and other examples of suitable isotypes and antibody constant regions are set out in more detail elsewhere herein.

[0328] 1.6.17. Formulations and Administration

[0329] Antibodies may be monoclonal or polyclonal, but are preferably provided as monoclonal antibodies for therapeutic use. They may be provided as part of a mixture of other antibodies, optionally including antibodies of different binding specificity.

[0330] Antibodies according to the invention, and encoding nucleic acid, will usually be provided in isolated form. Thus, the antibodies, VH and/or VL domains, and nucleic acids may be provided purified from their natural environment or their production environment. Isolated antibodies and isolated nucleic acid will be free or substantially free of material with which they are naturally associated, such as other polypeptides or nucleic acids with which they are found in vivo, or the environment in which they are prepared (e.g., cell culture) when such preparation is by recombinant DNA technology in vitro. Optionally an isolated antibody or nucleic acid (1) is free of at least some other proteins with which it would normally be found, (2) is essentially free of other proteins from the same source, e.g., from the same species, (3) is expressed by a cell from a different species, (4) has been separated from at least about 50 percent of polynucleotides, lipids, carbohydrates, or other materials with which it is associated in nature, (5) is operably associated (by covalent or noncovalent interaction) with a polypeptide with which it is not associated in nature, or (6) does not occur in nature.

[0331] Antibodies or nucleic acids may be formulated with diluents or adjuvants and still for practical purposes be isolated—for example they may be mixed with carriers if used to coat microtitre plates for use in immunoassays, and may be mixed with pharmaceutically acceptable carriers or diluents when used in therapy. As described elsewhere herein, other active ingredients may also be included in therapeutic preparations. Antibodies may be glycosylated, either naturally in vivo or by systems of heterologous eukaryotic cells such as CHO cells, or they may be (for example if produced by expression in a prokaryotic cell) unglycosylated. The invention encompasses antibodies having a modified glycosylation pattern. In some applications, modification to remove undesirable glycosylation sites may be useful, or e.g., removal of a fucose moiety to increase ADCC function [38]. In other applications, modification of galactosylation can be made in order to modify CDC.

[0332] Typically, an isolated product constitutes at least about 5%, at least about 10%, at least about 25%, or at least about 50% of a given sample. An antibody may be substantially free from proteins or polypeptides or other contaminants that are found in its natural or production environment that would interfere with its therapeutic, diagnostic, prophylactic, research or other use.

[0333] An antibody may have been identified, separated and/or recovered from a component of its production environment (eg, naturally or recombinantly). The isolated antibody may be free of association with all other components from its production environment, eg, so that the antibody has been isolated to an FDA-approvable or approved standard. Contaminant components of its production environment, such as that resulting from recombinant transfected cells, are materials that would typically interfere with research, diagnostic or therapeutic uses for the antibody, and may include enzymes, hormones, and other proteinaceous or non-proteinaceous solutes. In some embodiments, the antibody will be purified: (1) to greater than 95% by weight of antibody as determined by, for example, the Lowry method, and in some embodiments, to greater than 99% by weight; (2) to a degree sufficient to obtain at least 15 residues of N-terminal or internal amino acid sequence by use of a spinning cup sequenator, or (3) to homogeneity by SDS-PAGE under non-reducing or reducing conditions using Coomassie blue or silver stain. Isolated antibody includes the antibody in situ within recombinant cells since at least one component of the antibody's natural environment will not be present. Ordinarily, however, an isolated antibody or its encoding nucleic acid will be prepared by at least one purification step.

[0334] The invention provides therapeutic compositions comprising the antibodies described herein. Therapeutic compositions comprising nucleic acid encoding such antibodies are also provided. Encoding nucleic acids are described in more detail elsewhere herein and include DNA and RNA, e.g., mRNA. In therapeutic methods described herein, use of nucleic acid encoding the antibody, and/or of cells containing such nucleic acid, may be used as alternatives (or in addition) to compositions comprising the antibody itself. Cells containing nucleic acid encoding the antibody, optionally wherein the nucleic acid is stably integrated into the genome, thus represent medicaments for therapeutic use in a patient. Nucleic acid encoding the anti-ICOS antibody may be introduced into human B lymphocytes, optionally B lymphocytes derived from the intended patient and modified ex vivo. Optionally, memory B cells are used. Administration of cells containing the encoding nucleic acid to the patient provides a reservoir of cells capable of expressing the anti-ICOS antibody, which may provide therapeutic benefit over a longer term compared with administration of isolated nucleic acid or isolated antibody.

[0335] Compositions may contain suitable carriers, excipients, and other agents that are incorporated into formulations to provide improved transfer, delivery, tolerance, and the like. A multitude of appropriate formulations can be found in the formulary known to all pharmaceutical chemists: Remington's Pharmaceutical Sciences, Mack Publishing Company, Easton, Pa. These formulations include, for example, powders, pastes, ointments, jellies, waxes, oils, lipids, lipid (cationic or anionic) containing vesicles (such as LIPOFECTINT™), DNA conjugates, anhydrous absorption pastes, oil-in-water and water-in-oil emulsions, emulsions carbowax (polyethylene glycols of various molecular weights), semi-solid gels, and semi-solid mixtures containing carbowax. See also Powell et al. “Compendium of excipients for parenteral formulations” PDA (1998) J Pharm Sci Technol 52:238-311. Compositions may comprise the antibody or nucleic acid in combination with medical injection buffer and/or with adjuvant.

[0336] Antibodies, or their encoding nucleic acids, may be formulated for the desired route of administration to a patient, e.g., in liquid (optionally aqueous solution) for injection. Various delivery systems are known and can be used to administer the pharmaceutical composition of the invention. Methods of introduction include, but are not limited to, intradermal, intramuscular, intraperitoneal, intravenous, subcutaneous, intranasal, epidural, and oral routes. Formulating antibodies for subcutaneous administration typically requires concentrating them into a smaller volume compared with intravenous preparations. The high potency of antibodies according to the present invention may lend them to use at sufficiently low doses to make subcutaneous formulation practical, representing an advantage compared with less potent anti-ICOS antibodies.

[0337] The composition may be administered by any convenient route, for example by infusion or bolus injection, by absorption through epithelial or mucocutaneous linings (e.g., oral mucosa, rectal and intestinal mucosa, etc.) and may be administered together with other biologically active agents. Administration can be systemic or local.

[0338] The pharmaceutical composition can be also delivered in a vesicle, in particular a liposome (see Langer (1990) Science 249:1527-1533; Treat et al. (1989) in Liposomes in the Therapy of Infectious Disease and Cancer, Lopez Berestein and Fidler (eds.), Liss, New York, pp. 353-365; Lopez-Berestein, ibid., pp. 317-327; see generally ibid.).

[0339] In certain situations, the pharmaceutical composition can be delivered in a controlled release system. In one embodiment, a pump may be used (see Langer, supra; Sefton (1987) CRC Crit. Ref. Biomed. Eng. 14:201). In another embodiment, polymeric materials can be used; see, Medical Applications of Controlled Release, Langer and Wise (eds.), CRC Pres., Boca Raton, Fla. (1974). In yet another embodiment, a controlled release system can be placed in proximity of the composition's target, thus requiring only a fraction of the systemic dose (see, e.g., Goodson, in Medical Applications of Controlled Release, supra, vol. 2, pp. 115-138, 1984).

[0340] The injectable preparations may include dosage forms for intravenous, subcutaneous, intracutaneous and intramuscular injections, drip infusions, etc. These injectable preparations may be prepared by methods publicly known. For example, the injectable preparations may be prepared, e.g., by dissolving, suspending or emulsifying the antibody or its salt described above in a sterile aqueous medium or an oily medium conventionally used for injections. As the aqueous medium for injections, there are, for example, physiological saline, an isotonic solution containing glucose and other auxiliary agents, etc., which may be used in combination with an appropriate solubilizing agent such as an alcohol (e.g., ethanol), a polyalcohol (e.g., propylene glycol, polyethylene glycol), a nonionic surfactant [e.g., polysorbate 80, HCO-50 (polyoxyethylene (50 mol) adduct of hydrogenated castor oil)], etc. As the oily medium, there are employed, e.g., sesame oil, soybean oil, etc., which may be used in combination with a solubilizing agent such as benzyl benzoate, benzyl alcohol, etc. The injection thus prepared can be filled in an appropriate ampoule. A pharmaceutical composition of the present invention can be delivered subcutaneously or intravenously with a standard needle and syringe. It is envisaged that treatment will not be restricted to use in the clinic. Therefore, subcutaneous injection using a needle-free device is also advantageous. With respect to subcutaneous delivery, a pen delivery device readily has applications in delivering a pharmaceutical composition of the present invention. Such a pen delivery device can be reusable or disposable. A reusable pen delivery device generally utilizes a replaceable cartridge that contains a pharmaceutical composition. Once all of the pharmaceutical composition within the cartridge has been administered and the cartridge is empty, the empty cartridge can readily be discarded and replaced with a new cartridge that contains the pharmaceutical composition. The pen delivery device can then be reused. In a disposable pen delivery device, there is no replaceable cartridge. Rather, the disposable pen delivery device comes prefilled with the pharmaceutical composition held in a reservoir within the device. Once the reservoir is emptied of the pharmaceutical composition, the entire device is discarded. Numerous reusable pen and autoinjector delivery devices have applications in the subcutaneous delivery of a pharmaceutical composition of the present invention. Examples include, but certainly are not limited to AUTOPEN™ (Owen Mumford, Inc., Woodstock, UK), DISETRONIC™ pen (Disetronic Medical Systems, Burghdorf, Switzerland), HUMALOG MIX 75/25™ pen, HUMALOG™ pen, HUMALIN 70/30™ pen (Eli Lilly and Co., Indianapolis, Ind.), NOVOPENTMI, II and III (Novo Nordisk, Copenhagen, Denmark), NOVOPEN JUNIOR™ (Novo Nordisk, Copenhagen, Denmark), BD™ pen (Becton Dickinson, Franklin Lakes, N.J.), OPTIPENT™, OPTIPEN PRO™, OPTIPEN STARLET™, and OPTICLIKT™ (Sanofi-Aventis, Frankfurt, Germany), to name only a few. Examples of disposable pen delivery devices having applications in subcutaneous delivery of a pharmaceutical composition of the present invention include, but certainly are not limited to the SOLOSTAR™ pen (Sanofi-Aventis), the FLEXPEN™ (Novo Nordisk), and the KWIKPEN™ (Eli Lilly).

[0341] Advantageously, the pharmaceutical compositions for oral or parenteral use described above are prepared into dosage forms in a unit dose suited to fit a dose of the active ingredients. Such dosage forms in a unit dose include, for example, tablets, pills, capsules, injections (ampoules), suppositories, etc. The amount of the aforesaid antibody contained is generally about 5 to about 500 mg per dosage form in a unit dose; especially in the form of injection, the aforesaid antibody may be contained in about 5 to about 100 mg and in about 10 to about 250 mg for the other dosage forms.

[0342] The antibody, nucleic acid, or composition comprising it, may be contained in a medical container such as a phial, syringe, IV container or an injection device. In an example, the antibody, nucleic acid or composition is in vitro, and may be in a sterile container. In an example, a kit is provided comprising the antibody, packaging and instructions for use in a therapeutic method as described herein.

[0343] One aspect of the invention is a composition comprising an antibody or nucleic acid of the invention and one or more pharmaceutically acceptable excipients, examples of which are listed above. “Pharmaceutically acceptable” refers to approved or approvable by a regulatory agency of the USA Federal or a state government or listed in the U.S. Pharmacopeia or other generally recognized pharmacopeia for use in animals, including humans. A pharmaceutically acceptable carrier, excipient, or adjuvant can be administered to a patient, together with an agent, e.g., any antibody or antibody chain described herein, and does not destroy the pharmacological activity thereof and is nontoxic when administered in doses sufficient to deliver a therapeutic amount of the agent.

[0344] In some embodiments, an anti-ICOS antibody will be the sole active ingredient in a composition according to the present invention. Thus, a composition may consist of the antibody or it may consist of the antibody with one or more pharmaceutically acceptable excipients. However, compositions according to the present invention optionally include one or more additional active ingredients. Detailed description of agents with which the anti-ICOS antibodies may be combined is provided elsewhere herein. Optionally, compositions contain multiple antibodies (or encoding nucleic acids) in a combined preparation, e.g., a single formulation comprising the anti-ICOS antibody and one or more other antibodies. Other therapeutic agents that it may be desirable to administer with antibodies or nucleic acids according to the present invention include analgaesic agents. Any such agent or combination of agents may be administered in combination with, or provided in compositions with antibodies or nucleic acids according to the present invention, whether as a combined or separate preparation. The antibody or nucleic acid according to the present invention may be administered separately and sequentially, or concurrently and optionally as a combined preparation, with another therapeutic agent or agents such as those mentioned.

[0345] Anti-ICOS antibodies for use in a particular therapeutic indication may be combined with the accepted standard of care. Thus, for anti-cancer treatment, the antibody therapy may be employed in a treatment regimen that also includes chemotherapy, surgery and/or radiation therapy for example. Radiotherapy may be single dose or in fractionated doses, either delivered to affected tissues directly or to the whole body.

[0346] Multiple compositions can be administered separately or simultaneously. Separate administration refers to the two compositions being administered at different times, e.g. at least 10, 20, 30, or 10-60 minutes apart, or 1, 2, 3, 4, 5, 6, 7, 8, 9, 10, 12 hours apart. One can also administer compositions at 24 hours apart, or even longer apart. Alternatively, two or more compositions can be administered simultaneously, e.g. less than 10 or less than 5 minutes apart. Compositions administered simultaneously can, in some aspects, be administered as a mixture, with or without similar or different time release mechanism for each of the components.

[0347] Antibodies, and their encoding nucleic acids, can be used as therapeutic agents. Patients herein are generally mammals, typically humans. An antibody or nucleic acid may be administered to a mammal, e.g., by any route of administration mentioned herein.

[0348] Administration is normally in a “therapeutically effective amount”, this being an amount that produces the desired effect for which it is administered, sufficient to show benefit to a patient. The exact amount will depend on the purpose of the treatment, and will be ascertainable by one skilled in the art using known techniques (see, for example, Lloyd (1999) The Art, Science and Technology of Pharmaceutical Compounding). Prescription of treatment, e.g. decisions on dosage etc, is within the responsibility of general practitioners and other medical doctors and may depend on the severity of the symptoms and/or progression of a disease being treated. A therapeutically effective amount or suitable dose of antibody or nucleic acid can be determined by comparing its in vitro activity and in vivo activity in an animal model. Methods for extrapolation of effective dosages in mice and other test animals to humans are known.

[0349] As indicated by the in vivo studies described in the Examples herein, anti-ICOS antibody may be effective at a range of doses, including surprisingly low doses. Surprisingly, in view of these pre-clinical studies, low doses per body weight of anti-ICOS antibodies (e.g., KY1044) or low fixed doses of anti-ICOS antibodies (e.g., KY1044) were effective at yielding partial or complete anti-tumour activity in human patients across various cancers.

[0350] Anti-ICOS antibodies (e.g., full length antibodies or antigen-binding fragments thereof) may be administered to a subject in an amount in one of the following values or ranges per dose:

[0351] about 10 μg/kg body weight to about 3 mg/kg body weight,

[0352] about 10 μg/kg body weight to about 1 mg/kg body weight,

[0353] about 10 μg/kg body weight to about 0.3 mg/kg body weight,

[0354] about 10 μg/kg body weight to about 0.1 mg/kg body weight, or

[0355] about 10 μg/kg body weight to about 30 μg/kg body weight.

[0356] For fixed dosing in adult humans, a suitable dose may be about 10 mg or lower, 9 mg or lower, or about 8 mg or lower, e.g., about 8 mg, about 7 mg, about 6 mg, about 5 mg, about 4 mg, about 3 mg, about 2.4 mg, about 2 mg, about 1 mg, about 0.8 mg, or about 0.5 mg, or any value in between. In some embodiments, the subject is administered an anti-ICOS antibody (e.g., KY1044) at about 0.5-10 mg per dose. In some embodiments, the subject is administered an anti-ICOS antibody (e.g., KY1044) at about 0.5-8 mg per dose. In some embodiments, the subject is administered an anti-ICOS antibody (e.g., KY1044) at about 0.8-8 mg per dose. In some embodiments, the subject is administered an anti-ICOS antibody (e.g., KY1044) at about 0.8-2.4 mg per dose.

[0357] In some embodiments, the subject is administered an anti-ICOS antibody (e.g., KY1044) at about 8 mg per dose. In some embodiments, the subject is administered an anti-ICOS antibody (e.g., KY1044) at about 2.4 mg per dose. In some embodiments, the subject is administered an anti-ICOS antibody (e.g., KY1044) at about 0.8 mg per dose.

[0358] In methods of treatment described herein, one or more doses may be administered. In some cases, a single dose may be effective to achieve a long-term benefit. Thus, the method may comprise administering a single dose of the antibody, its encoding nucleic acid, or the composition. Alternatively, multiple doses may be administered, usually sequentially and separated by a period of days, weeks or months. An anti-ICOS antibody may be repeatedly administered to a subject at intervals of 2 to 6 weeks, e.g., every 2 weeks, every 3 weeks, every 4 weeks, every 5 weeks, or every 6 weeks. In some embodiments, the anti-ICOS antibody is administered to a subject every 3 weeks. In some embodiments, the anti-ICOS antibody is administered to a subject every 6 weeks. In some embodiments, KY1044 is administered to a subject every 3 weeks. In some embodiments, KY1044 is administered to a subject every 6 weeks. Optionally, the anti-ICOS antibody may be administered to a subject once a month, or less frequently, e.g., every two months or every three months. Accordingly, a method of treating a patient may comprise administering a single dose of the anti-ICOS antibody to the subject, and not repeating the administration for at least one month, at least two months, at least three months, and optionally not repeating the administration for at least 12 months.

[0359] In some embodiments the anti-ICOS antibody, e.g., KY1044, is administered to the subject for at least 6 months. In some embodiments the anti-ICOS antibody, e.g., KY1044, is administered to the subject for 6 months. In some embodiments the anti-ICOS antibody, e.g., KY1044, is administered to the subject for at least 12 months. In some embodiments the anti-ICOS antibody, e.g., KY1044, is administered to the subject for 12 months. In some embodiments the anti-ICOS antibody, e.g., KY1044, is administered to the subject for longer than 12 months.

[0360] In some embodiments, KY1044 is administered to a subject every 3 weeks for at least 6 months, e.g., for 6 months, for 12 months, or for longer than 12 months.

[0361] Comparable therapeutic effects may be obtained using either one or multiple doses of anti-ICOS antibody, which may be a result of a single dose of antibody being effective to reset the tumour microenvironment. Physicians can tailor the administration regimen of the anti-ICOS antibody to the disease and the patient undergoing therapy, taking into account the disease status and any other therapeutic agents or therapeutic measures (e.g., surgery, radiotherapy etc) with which the anti-ICOS antibody is being combined. In some embodiments, an effective dose of an anti-ICOS antibody is administered more frequently than once a month, such as, for example, once every three weeks, once every two weeks, or once every week. Treatment with anti-ICOS antibody may include multiple doses administered over a period of at least a month, at least six months, or at least a year. The multiple doses may be the same or may be different.

[0362] As used herein, the terms “treat,” “treatment,” “treating,” or “amelioration” refer to therapeutic treatments, wherein the object is to reverse, alleviate, ameliorate, inhibit, slow down or stop the progression or severity of a condition associated with a disease or disorder. The term “treating” includes reducing or alleviating at least one adverse effect or symptom of a condition, disease or disorder. Treatment is generally “effective” if one or more symptoms or clinical markers are reduced. Alternatively, treatment is “effective” if the progression of a disease is reduced or halted. That is, “treatment” includes not just the improvement of symptoms or markers, but also a cessation of, or at least slowing of, progress or worsening of symptoms compared to what would be expected in the absence of treatment. Beneficial or desired clinical results include, but are not limited to, alleviation of one or more symptom(s), diminishment of extent of disease, stabilised (i.e., not worsening) state of disease, delay or slowing of disease progression, amelioration or palliation of the disease state, remission (whether partial or total), and/or decreased mortality, whether detectable or undetectable. The term “treatment” of a disease also includes providing relief from the symptoms or side-effects of the disease (including palliative treatment). For treatment to be effective a complete cure is not contemplated. The method can in certain aspects include cure as well. In the context of the invention, treatment may be preventative treatment.

[0363] In some embodiments, “treating” comprises treating a disease or condition amenable to therapy by depleting regulatory T cells (Tregs) and/or increasing effector T cell (Teff) response. As used herein, such a disease or condition includes but is not limited to a tumour and/or a cancer. In some embodiments, the cancer is an advanced and/or metastatic cancer.

[0364] As used herein, “about” in reference to a dosing amount in mg refers to plus or minus 0.1 mg of the stated value if the stated value is less than 1.5 mg, and refers to plus or minus 0.5 mg of the stated value if the stated value is at least 1.5 mg.

[0365] 1.6.18. T Cell Therapy

[0366] WO2011/097477 described use of anti-ICOS antibodies for generating and expanding T cells, by contacting a population of T cells with a first agent that provides a primary activation signal (e.g., an anti-CD3 antibody) and a second agent that activates ICOS (e.g., an anti-ICOS antibody), optionally in the presence of a Th17 polarising agent such as IL-10, IL-6, neutralising anti-IFNγ and/or anti-IL-4. Anti-ICOS antibodies described herein may be used in such methods to provide T cell populations. Populations of cultured expanded T cells having therapeutic activity (e.g., anti-tumour activity) may be generated. As described in WO2011/097477, such T cells may be used therapeutically in methods of treating patients by immunotherapy.

[0367] 1.6.19. Morphological Assay for Anti-ICOS Antibodies as Therapeutic Candidates

[0368] It was observed that when candidate therapeutic anti-ICOS antibodies were coupled to a solid surface and brought into contact with ICOS-expressing T cells, they were able to induce morphological change in the cells. On addition of ICOS+ T cells to wells that were internally coated with anti-ICOS antibodies, cells were seen to change from their initial rounded shape, adopting a spindle-shape, spreading and adhering to the antibody-coated surface. This morphological change was not observed with control antibody. Moreover, the effect was found to be dose-dependent, with faster and/or more pronounced shape change occurring as the concentration of antibody on the surface increased. The shape change provides a surrogate indicator of T cell binding to ICOS, and/or of agonism by anti-ICOS antibody. The assay may be used to identify an antibody that promotes multimerisation of ICOS on the T cell surface. Such antibodies represent therapeutic candidate agonist antibodies. Conveniently, the visual indicator provided by this assay is a simple method of screening antibodies or cells, particularly in large numbers. The assay may be automated to run in a high-throughput system.

[0369] Accordingly, one aspect of the invention is an assay for selecting an antibody that binds ICOS, optionally for selecting an ICOS agonist antibody, the assay comprising:

[0370] providing an array of antibodies immobilised (attached or adhered) to a substrate in a test well;

[0371] adding ICOS-expressing cells (e.g., activated primary T cells, or MJ cells) to the test well;

[0372] observing morphology of the cells;

[0373] detecting shape change in the cells from rounded to flattened against the substrate within the well; wherein the shape change indicates that the antibody is an antibody that binds ICOS, optionally an ICOS agonist antibody, and

[0374] selecting the antibody from the test well.

[0375] The assay may be run with multiple test wells, each containing a different antibody for testing, optionally in parallel, e.g., in a 96 well plate format. The substrate is preferably an inner surface of the well. Thus, a two-dimensional surface is provided against which flattening of the cells may be observed. For example, the bottom and/or wall of a well may be coated with antibody. Tethering of antibody to the substrate may be via a constant region of the antibody.

[0376] A negative control may be included, such an antibody known not to bind ICOS, preferably an antibody that does not bind an antigen on the surface of the ICOS-expressing cells to be used. The assay may comprise quantifying the degree of morphological change and, where multiple antibodies are tested, selecting an antibody that induces greater morphological change than one or more other test antibodies.

[0377] Selection of antibody may comprise expressing nucleic acid encoding the antibody present in the test well of interest, or expressing an antibody comprising the CDRs or antigen binding domain of that antibody. The antibody may optionally be reformatted, for example to provide an antibody comprising the antigen binding domain of the selected antibody, e.g., an antibody fragment, or an antibody comprising a different constant region. A selected antibody is preferably provided with a human IgG1 constant region or other constant region as described herein. A selected antibody may further be formulated in a composition comprising one or more additional ingredients—suitable pharmaceutical formations are discussed elsewhere herein.

[0378] Various further aspects and embodiments of the present invention will be apparent to those skilled in the art in view of the present disclosure. All documents mentioned in this specification, including published US counterparts of any patents or patent applications referred to, are incorporated herein by reference in their entirety.

### 1.7. EXPERIMENTAL EXAMPLES

[0379] The generation, characterisation, and performance of anti-ICOS antibodies were previously disclosed in U.S. Pat. No. 9,957,323.

### 1.8. Example 1: Monotherapeutic Efficacy of Anti-ICOS Ab Against A20 Tumour Growth in Mouse

[0380] Anti-ICOS antibodies STIM001 mIgG2a and STIM003 mIgG2a each showed strong anti-tumour efficacy when used as monotherapies in vivo in a mouse A20 syngeneic model.

[0381] 1.8.1. Materials and Methods

[0382] The efficacy study was performed in BALB/c mice using the sub-cutaneous A20 reticulum cell sarcoma model (ATCC, TIB-208). The A20 cell line is a BALB/c B cell lymphoma line derived from a spontaneous reticulum cell neoplasm found in an old BALB/cAnN mouse. This cell line has been reported to be positive for ICOSL.

[0383] BALB/c mice were supplied by Charles River UK>18 gram and housed under specific pathogen-free conditions. A total of 5×10e5 A20 cells (passage number below P20) were subcutaneously injected into the right flanks of mice. The A20 cells were passaged in vitro washed twice in PBS and re-suspended in RPMI supplemented with 10% foetal calf serum. Cell viability was confirmed to be above 85% at the time of tumour cell injection. Unless stated otherwise, antibody or isotype administration was initiated from day 8 post tumour cells injection.

[0384] STIM001 and STIM003 anti-ICOS antibodies were generated in mouse IgG2a isotype format. The mouse cross reactive anti-PD-L1 antibody (AbW) was also generated in the same isotype format (mouse IgG2a). STIM001, STIM003 and anti-PD-L1 antibodies were dosed intraperitoneally (IP) at 200 μg of each antibody twice a week starting from day 8 (dosing for 3 weeks between day 8-29) post tumour cell implantation. Animal weights and tumour volume were measured 3 times a week from the day of tumour cell injection. Tumour volume was calculated by use of the modified ellipsoid formula ½(Length×Width2). Mice were kept on study until their tumour reached an average diameter of 12 mm. The experiment was stopped at day 43 post tumour cell implantation. Tumour growth was monitored and compared with tumours of animals treated with isotype control (mIgG2a) antibody. Treatment groups are shown in Table E20 below.

TABLE E20
Treatment groups for A20 study.

| | Number | |
|---|---|---|
| | of | Treatment regimen |
| Group | animals | (twice per week for 3 weeks 7 doses) |
| 1 | 8 | mIgG2a isotype control 200 μg/mouse/ each dose |
| 2 | 8 | Anti-PD-Ll mIGg2a (AbW) 200 μg/mouse/ each dose |
| 3 | 8 | Anti-ICOS mIgG2a STIM001 200 μg/mouse each dose |
| 4 | 8 | Anti-ICOS mIgG2a STIM003 200 μg/mouse/ each dose |

[0385] 1.8.2. Results

[0386] Monotherapy administration of either STIM001 or STIM003 (mIgG2a) in the A20 tumour model produced a complete anti-tumour response (FIG. 3, FIG. 4). All the animals administered with either STIM001 or STIM003 were cured of the disease. This contrasts with the results in the isotype control and PD-L1 mIgG2a groups (FIG. 1, FIG. 2). In rare cases, regression of tumours was observed for some animals in the isotype control (spontaneous regression) and anti-PDL-1 groups, but treatment with anti-ICOS antibody produced significantly greater efficacy. At the end of the study, 3 of 8 control animals and 2 of 8 anti-PDL-1 treated animals had no tumour. However, all animals treated with either STIM001 or STIM003 were tumour free at the end of the study (8 of 8 mice in both groups), representing 100% cure using the anti-ICOS antibodies.

### 1.9. Example 2: Strong Anti-Tumour Efficacy In Vivo in the J558 Myeloma Syngeneic Model for Combination of Anti-ICOS Antibody and Anti-PD-L1 Antibody

[0387] Anti-ICOS antibody STIM003 mIgG2a and anti-PD-L1 antibody AbW mIgG2a were administered individually and in combination in the J558 tumour model. This is a syngeneic mouse model of myeloma. The anti-ICOS antibody was found to inhibit tumour growth when dosed as monotherapy or in combination with anti-PD-L1.

[0388] 1.9.1. Materials & Methods

[0389] Anti-tumour efficacy studies were performed in Balb/c mice using the sub-cutaneous J558 plasmacytoma:myeloma cell line (ATCC, TIB-6). Balb/c mice were supplied by Charles River UK at 6-8 weeks of age and >18 g and housed under specific pathogen-free conditions. A total of 5×10⁶ cells (passage number below P15) were subcutaneously injected (in 100 μl) into the right flanks of mice. Unless stated otherwise, on day 11 post tumour cells injection, the animals were randomised based on tumour size and treatments were initiated. The J558 cells were passaged in vitro by using TrypLE™ Express Enzyme (Thermofisher), washed twice in PBS and resuspended in DMEM supplemented with 10% foetal calf serum. Cell viability was confirmed to be above 90% at the time of tumour cell injection.

[0390] Treatment was initiated when the tumours reached an average volume of ˜140 mm\hat{ }3. Animals were then allocated to 4 groups with similar average tumour size (see Table E-21 for the dosing groups). Both antibodies, which are mouse cross-reactive, were dosed IP from day 11 (post tumour cell implantation) twice a week for 3 weeks (FIG. 8) unless the animals had to be removed from study due to welfare (rare) or tumour size. As a control, a group of animals (n=10) was dosed at the same time using a saline solution. For the combination group, both STIM003 and anti-PDL1 antibodies were dosed concurrently IP at 60 μg and 200 μg respectively (in 0.9% saline). Tumour growth was monitored over 37 days and compared to tumours of animals treated with saline. Animal weight and tumour volume were measured 3 time a week from the day of tumour cell injection. Tumour volume was calculated by use of the modified ellipsoid formula ½(Length×Width²). Mice were kept on studies until their tumour reached an average diameter of 12 mm³ or, in rare cases, when incidence of tumour ulceration was observed (welfare).

TABLE E21
Treatment groups for J558 efficacy study.

| | Number | |
|---|---|---|
| | of | |
| Groups | animals | Treatment regimen twice per week from day 11 |
| 1 | 10 | Saline |
| 2 | 8 | Anti-PD-L1 mIgG2a 200 μg (AbW) |
| 3 | 8 | Anti-ICOS STIM003 mIgG2a/anti-PD-Ll mIgG2a |
| | | (AbW) combination 60 μg/200 μg (respectively) |
| 4 | 8 | Anti-ICOS STIM003 mIgG2a 60 μg |

[0391] 1.9.2. Results

[0392] J558 syngeneic tumours were highly aggressive and all the animals in the saline control group (n=10) had to be removed from studies by day 21 due to tumour size. The anti-STIM003 mIgG2a and the anti-PDL1 mIgG2a both demonstrated good efficacy as monotherapies in this model with 37.5% and 75% of the animals cured of disease, respectively. Importantly, combination of the two antibodies resulted in 100% of the animals having rejected the plasmacytoma tumours by day 37. Data are shown in FIG. 8.

### 1.10. Example 3: Administration of Anti-PD1 Increases ICOS Expression on TILs Significantly More than Anti-PD-L1 Antibody

[0393] A pharmacodynamic study was performed in animals harbouring established CT26 tumours to evaluate the effect of treatment with anti-PD-L1 or anti-PD-1 antibodies on ICOS expression on subsets of tumour infiltrating lymphocytes (TILs). The following antibodies were compared:
[0394] anti-PD-L1 AbW mIgG1 [limited effector function]
[0395] anti-PD-L1 AbW mIgG2a [with effector function]
[0396] anti-PD-L1 10F9.G2 rat IgG2b [with effector function]
[0397] anti-PD1 antibody RMT1-14 rat IgG2a [effector null].

[0398] Tumours of treated mice were isolated, dissociated to single cells and stained for CD45, CD3, CD4, CD8, FOXP3 and ICOS.

[0399] 1.10.1. Materials & Methods

[0400] Rat anti-PD-1 RMP1-14 IgG2a (BioXCell; Catalog number: BE0146), rat anti-PD-L1 10F9.G2 IgG2b (Bio-Legend; Catalog number: 124325) and anti-PD-L1 AbW mIgG1 and mIgG2a were tested in the CT26 tumour model by dosing i.p. with 130 μg on days 13 and 15 post tumour cell implantation. On day 16, animals were culled and the mouse tumours were harvested for FACS analysis. Tumours were dissociated using a mouse tumour dissociation kit (Miltenyi Biotec) and homogenised. The resulting cell suspensions were clarified through 70 μM filters, pelleted and resuspended in FACS buffer at 2 million cells/well in a 96 well plate. The cell suspensions were incubated with anti-16/32 mAb (eBioscience) and stained with FACS antibodies specific for CD3 (17A2), CD45 (30-F11), CD4 (RM4-5), CD8 (53-6.7) and ICOS (7E.17G9) all obtained from eBioscience Ltd. Cells were also stained with LiveDead Yellow fixable viability dye (Life technologies). For the Foxp3 intracellular staining, samples were fixed, permeabilised, and stained with antibody specific for Foxp3 (eBioscience, FJK-16s). The samples were resuspended in PBS and data acquired on the Attune flow cytometer (Invitrogen) and analysed using FlowJo V10 software (Treestar).

[0401] 1.10.2. Results

[0402] Treatment with anti-PD1 and anti-PD-L1 antibodies only resulted in a marginal increase in the percentage on CD8 cells and T Regs expressing ICOS at the measured timepoint. However, in response to anti-PD1 rat IgG2a, a clear and significant (over the saline treated group) increase in ICOS expression (increased dMFI) was observed on the surface of ICOS+ve CD8 cells. ICOS expression was also noted to be upregulated on CD4 effector and CD4 T Reg cells although this did not reach statistical significance. This anti-PD1 antibody induced a marked increase in ICOS expression on CD8 effector cells that was barely seen with the anti-PD-L1 mIgG2a. Similarly, when comparing the different formats of anti-PD-L1 antibodies, in some of the animals treated it was observed that the antibody having the lowest effector function (mIgG1) was associated with higher ICOS expression on effector CD8 and CD4 cells when compared with antibody having effector function (mIgG2a and ratIgG2b), which rarely showed this. See FIG. 9.

[0403] An increase in ICOS expression on effector CD8/CD4 T cells may have the effect of rendering these cells more sensitive to depletion by anti-ICOS antibody (e.g., on treatment of mice with STIM003 mIgG2a). An antibody that exhibits lower ICOS induction in effector CD8 and CD4 T cells may be preferable for use in combination with anti-ICOS antibody. The data from this study indicate that anti-PD-L1 effector positive antibody may be especially suitable for combination with anti-ICOS effector positive antibody, reflecting the anti-tumour efficacy observed when combining anti-PDL1 mIgG2a with STIM003 mIgG2a reported in other Examples herein.

### 1.11. Example 4: Strong Anti-Tumour Efficacy of Single Dose Anti-ICOS Antibody Monotherapy In Vivo in a B Cell Lymphoma Syngeneic Model

[0404] This experiment confirms the anti-tumour efficacy of STIM003 mIgG2a as monotherapy. Strong anti-tumour efficacy was demonstrated after short exposure of STIM003 mIgG2a.

[0405] 1.11.1. Materials & Methods

[0406] Efficacy studies were performed in BALB/c mice using the sub-cutaneous A20 Reticulum Cell Sarcoma model (ATCC number CRL-TIB-208). BALB/c mice were supplied by Charles River UK at 6-8 weeks of age and >18 g and housed under specific pathogen-free conditions. A total of 5×10E5 A20 cells (passage number below P20) were subcutaneously injected into the right flanks of mice. Treatments were initiated at day 8 post tumour cells injection as shown in the table below. The A20 cells were passaged in vitro by using TrypLE™ Express Enzyme (Thermofisher), washed twice in PBS and resuspended in RPMI supplemented with 10% foetal calf serum. Cell viability was confirmed to be above 85% at the time of tumour cell injection. STIM003 mIgG2a was used either as a single dose (SD) of 60 μg (equivalent to 3 mg/kg for a 20 g animal) or as multiple doses (MD, twice a week for 3 weeks) of 60 μg. Anti-tumour efficacy observed in response to the two schedules was compared to that of animals “treated” with saline (MD, twice a week for 3 weeks). The antibodies were dosed intraperitoneal (IP) as 1 mg/ml in 0.9% saline. Animal weight and tumour volume were measured 3 times a week from the day of tumour cell injection. Tumour volume was calculated by use of the modified ellipsoid formula ½(Length×Width). Mice were kept on study until their tumour reached an average diameter of 12 mm or, rarely, when incidence of tumour ulceration was observed (welfare).

TABLE E23-1
Treatment groups.

| | Number | |
|---|---|---|
| | of | |
| Group | animals | Treatment regimen (IP injection) |
| 1 | 10 | Saline (multiple dose from day 8, twice a week for 3 |
| | | weeks) |
| 2 | 10 | STIM003 mIgG2A (multiple dose from day 8, |
| | | twice a week for 3 weeks) |
| 3 | 10 | STIM003 mIgG2A (Single dose on day 8) |

[0407] 1.11.2. Results

[0408] Both multiple and single dose of STIM003 mIgG2a resulted in strong and significant monotherapy anti-tumour efficacy as shown by the number of animals with no signs of tumour growth at endpoint (Day 41). SD resulted in 7 our 10 animals cured from the disease whereas the multiple dose cured 9 out of 10 animals injected with A20 B cell lymphoblast. All animals in the saline treated group had to be removed from the study by day 40 due to tumour size. See FIG. 10.

[0409] Humane endpoint survival statistics were calculated from the Kaplan-Meier curves (FIG. 11) using GraphPad Prism V7.0. This approach was used to determine if the treatments were associated with improved survival. The Hazard Ratio (Mantel-Haenszel) values and their associated P values (Log-Rank Mantel-Cox) are shown in the table below.

TABLE E23-1
Hazard Ratio (Mantel-Haenszel) values and their associated P values
(Log-Rank Mantel-Cox) corresponding to FIG. 11 Kaplan-Meier curves.

| Hazard Ratio (Mantel-Haenszel) | MD vs Saline | SD vs Saline | MD vs SD |
|---|---|---|---|
| Ratio (and its reciprocal) | 0.09995 | 0.1076 | 0.5314 |
| 95% CI of ratio | 0.02604 to 0.3837 | 0.02856 to 0.4052 | 0.05522 to 5.115 |
| P Value | 0.0008 | 0.001 | 0.5842 |

### 1.12. Example 5: Time and Dose Dependent Effects of Anti-ICOS Antibody in CT-26 Tumour Bearing Animals

[0410] This Example presents the results of a pharmacodynamic study evaluating the effects of anti-ICOS antibody on immune cells in mice bearing CT-26 tumours. T and B cell subtypes from different tissues were analysed by FACS after a single dose of STIM003 mIgG2a.

[0411] 1.12.1. Methods

[0412] CT-26 tumour bearing animals were dosed i.p. with either saline or STIM003 at 200 μg, 60 μg or 6 μg on day 12 post tumour cell implantation. Tumour tissues, blood, tumour draining lymph node (TDLN) and spleen were harvested on day 1, 2, 3, 4, and day 8 post treatment. The tumours were dissociated to make single cell suspension using mouse tumour dissociation kit (Miltenyi Biotec). Spleen tissue was dissociated using gentle MACS dissociation, red blood cells were lysed using RBC lysis buffer. Tumour draining lymph nodes were mechanically disaggregated to make single cells suspensions. The resulting cell suspensions were clarified through either 70 μM or 40 μM filters depending on the tissue, cells were then washed twice in RMPI complete media and finally resuspended in ice cold FACS buffer. Total blood was collected into plasma tubes and red blood cells were lysed using RBC lysis buffer, cells were washed twice in RMPI complete media and finally resuspended in ice cold FACS buffer. The single cell suspension from all the tissues were distributed into 96 deep well plates for FACS analysis. Cells were stained with Live Dead Fixable Yellow viability dye (Life technologies). The cell suspensions were incubated with anti-CD16/CD32 mAb (eBioscience) and stained with FACS antibodies specific for CD3 (17A2), CD45 (30-F11), CD4 (RM4-5), CD8 (53-6.7), CD25 (PC61.5), ICOSL (HK5.3), B220 (RA3-6B2), Ki-67 (SolA15), CD107a (eBio1D4B), IFN-γ (XMG1.2), TNF-α (MP6-XT22), Foxp3 (FJK-16s) and ICOS (7E.17G9) all obtained from eBioscience Ltd. For cytokine readout by FACS, single cells suspensions from the tumours were plated in 24 well plate for 4 hours in the presence of Brefeldin-A. For the intracellular staining, samples were fixed, permeabilised, and stained with specific antibodies. The samples were finally resuspended in PBS and data acquired on the Attune flow cytometer (Invitrogen) and analysed using FlowJo V10 software (Treestar).

[0413] Results are presented and discussed below.

[0414] 1.12.2. ICOS Expression is High on Intra-Tumoral T-Regs in the CT26 Model

[0415] When the percentage of tumour infiltrating lymphocytes (TILs) expressing ICOS was compared to the percentage of immune cells in the spleen, blood, and TDLN, we demonstrated that more immune cells in the microenvironment of CT-26 tumours expressed ICOS vs other tissues. More importantly, the percentage of ICOS positive T-reg cells in all the tissues and at all the time points was higher than the percentage of CD4 or CD8 effector T cells positive for ICOS. Importantly, the dMFI (relative expression) for ICOS also followed the similar ranking in expression with intra-tumoural T-reg being highly positive for ICOS expression vs other TILs subtypes. Interestingly, there was no striking change in the percentage of ICOS⁺ TILs within the time frame of this experiment. Similar results were also seen in spleen and TDLN. On the other hand, in the blood, ICOS expression is relatively stable on T effector cells but increased on T-regs during the course of the experiment. Altogether the data demonstrated that more cells expressed ICOS in the tumour microenvironment and these positive cells also expressed more ICOS molecules on their surface. More importantly, T regs in TILs are highly positive for ICOS. See FIG. 12.

[0416] 1.12.3. Strong Depletion of Intra-Tumoural T-Reg Cells in Response to STIM003 Administration

[0417] In response to the STIM003 mIgG2a antibody, there was strong and rapid depletion of T-reg cells (CD4+CD25+Foxp3) in TME. As T-regs have high ICOS expression compared with the other T cells subsets, it is expected that an anti-ICOS antibody with effector function would preferentially deplete these cells. At the lower dose of STIM003 (6 μg corresponding to a 0.3 mg/kg for a 20 g animal) there was a continuous depletion of T-reg and by day 3 most of the T-reg were depleted from TME. Interestingly, by day 8, T-reg cells repopulate the TME then reach a level slightly above that observed in the saline treated animals. The repopulation of T-reg cells at lower dose can be attributed to the increase in the proliferating CD4 T cells in TME as evidenced by an observed increase in Ki-67+CD4 T-cells. At a dose higher than 6 μg there was a long-term depletion of T-reg cells in TME as shown by full T Reg depletion until the last time point analysed in this study (day 8). Whereas in the blood there was a transient depletion of T-reg cells at all doses. Importantly, by day 8, all the treated animals had similar (or higher for the 6 μg dose) level of T-reg cells in the blood when compared to the saline treated animals. Data are shown in FIG. 13. Notably, and similarly to data previously published for depleting CTLA-4 antibodies, there was no significant change in the percentage of T-reg cells in the spleen or TDLN tissues, suggesting that T-reg cells may be protected from depletion in these organs.

[0418] In summary, strong depletion of T-reg cells in TME was achieved in CT-26 model at a dose as low as 6 μg per animal. However, a dose of 60 μg resulted in long term depletion up to 8 days post STIM003 mIgG2a injection. This was not improved by using higher dose (200 μg).

[0419] 1.12.4. STIM003 mIgG2a Increased CD8:T Reg and CD4:T Reg Ratios

[0420] Effects of STIM003 on T-eff:T-reg ratios are shown in FIG. 14.

[0421] STIM003 mIgG2a increased the CD8:T-reg ratio as well as the CD4 eff:T-reg ratio. Although all the treatment doses were associated with an increase in T-eff to T-reg ratio, the intermediate dose of 60 μg (the equivalent of 3 mg/kg for a 20 g animals) was associated with the highest ratio by day 8 post treatment.

[0422] Interestingly, at the 6 μg dose, the ratios were high until day 4 but by day 8 post treatment they were matching that of the saline treated animals. This can be explained by the repopulation of TRegs observed for this dose by day 8 post treatment. On the other hand, at a dose of 60 or 200 μg, the Teff to T-reg ratios remained high at all time points. This is explained by a long term depeletion of Tregs at these doses. Notably, at higher dose (200 μg), despite the long term Treg depletion there was only a moderate improvement in the ratio by day 8. This can be explained by some depletion of ICOS' effector cells at high concentration of STIM003.

[0423] Altogether, the data demonstrated TReg depletion and increased Effector:T reg ratio at all doses tested. However, a dose of 60 μg (˜3 mg/kg) achieved both a long-term depletion of T-reg, as well as the highest T-eff to T-reg ratios which would be associated with the most favourable immune context to initiate an anti-tumour immune response. Interestingly a similar pattern was observed in the blood, with the intermediate dose of 60 μg associated with the highest T-eff to T-reg ratio. Importantly, in the blood, improvement of the ratio was observed at an earlier time point (between day 3 and day 4).

[0424] 1.12.5. Activation of Effector Cells in Response to STIM003

[0425] Surface expression of CD107a on the tumour infiltrating T effector cells was previously identified as a reliable marker for cells that have been activated and exert cytotoxic activity [39]. In the present study employed this marker to confirm that STIM003, in addition to depleting T-regs, can stimulate the cytotoxic activity of effector T cells in the TME. Interestingly, on day 8 post treatment, there was an increase in surface expression of CD107a on both the CD4 and CD8 effector T cell compartments at all doses of STIM003. Furthermore, this upregulation of CD107a expression on the surface on both CD4 and CD8 T cells appeared to plateau when animals were dosed at 60 μg as no improvement was seen at 200 μg dosing.

[0426] To further demonstrate activation of effector cells in the TME, the cytokine release by CD4 and CD8 TILs was analysed by FACS. As expected and consistent with the in-vitro agonism data presented in earlier Examples herein, STIM003 mIgG2a at all doses promoted pro-inflammatory cytokine IFN-γ and TNF-α production by effector CD4 and CD8 T cells. The induction of pro-inflammatory cytokine production appeared to be high at the dose of 60 μg. Indeed, 60 μg of STIM003 significantly increased cytokine production by CD4 T cells. A similar trend was seen for the proinflammatory cytokine IFN-γ and TNF-α production by effector CD8 T cells in TME. Data are shown in FIG. 15.

[0427] In summary, STIM003 at all the doses resulted in T cells activation in the TME as shown by (1) the presence of the degranulation marker CD107a on their surface and (2) by the production of Th1 cytokines (IFNγ and TNFα) by T cells. This indicates that STIM003 strongly affects the immune context in the TME and plays the dual role of depleting Treg cells and stimulate the killing activity of T effector cells.

[0428] 1.12.6. Human Dose Estimations

[0429] Based on the pre-clinical efficacy data seen in mice, initial predictions can be made of the clinical dose appropriate for human patients, based on corresponding biological surface area (BSA) [40].

[0430] For example, taking the anti-ICOS IgG dose in mouse to be 3 mg/kg (60 μg), and following the methods of ref [40], the corresponding dose for a human is 0.25 mg/kg.

[0431] Using the Mosteller formulae, for an individual of 60 kg and 1.70 m the BSA 1.68 m². Multiplying the dose in mg/kg by a factor of 35.7 (60/1.68) gives a fixed dose of 15 mg. For an individual of 80 kg the corresponding fixed dose would be 20 mg.

[0432] Doses may be adjusted for human therapy in clinical trials to determine safe and effective treatment regimens.

### 1.13. Example 6: Bioinformatic Analysis of Data from Tumour Samples

[0433] One target group of cancers according to the present invention is those cancers that are associated with a relatively high level of ICOS+immunosuppressive Tregs.

[0434] To identify cancer types associated with a high content of Tregs, transcriptome data was obtained from The Cancer Genome Atlas (TCGA) public dataset and analysed for ICOS and FOXP3 expression levels. TCGA is a large-scale study that has catalogued genomic and transcriptomic data accumulated for many different types of cancers, and includes mutations, copy number variation, mRNA and miRNA gene expression, and DNA methylation along with substantial sample metadata.

[0435] Gene Set enrichment analysis (GSEA) was conducted as follows. Gene expression RNA seq data collected as part of the TCGA consortium was downloaded from the UCSC Xena Functional Genomics Browser as log 2(normalized_count+1). Non-tumour tissue samples were removed from the dataset, leaving data for 20530 genes from 9732 samples. An algorithm from [41] and its implementation in [42] that calculates enrichment scores for genes within a specified gene set was used to transpose gene level counts to gene set scores for each sample. The gene set of interest was defined as containing both ICOS and FOXP3. Samples were grouped by primary disease and the ssGSEA scores for each group were compared across the 33 primary disease groups. The disease groups that showed the highest median scores were found to be lymphoid neoplasm diffuse large b-cell lymphoma, thymoma, head and neck squamous cell carcinoma, although diffuse large b-cell lymphoma showed a multimodal distribution of scores with a subset scoring highly and the rest scoring below the group median.

[0436] In rank order of highest to lowest ssGSEA score for ICOS and FOXP3 expression, the top 15 cancer types were:

| | |
|---|---|
| DLBC (n = 48) | lymphoid neoplasm diffuse large b-cell lymphoma |
| THYM (n = 120) | thymoma |
| HNSC (n = 522) | head and neck squamous cell carcinoma |
| TGCT (n = 156) | testicular germ cell tumour |
| STAD (n = 415) | stomach adenocarcinoma |
| SKCM (n = 473) | skin cutaneous melanoma |
| CESC (n = 305) | cervical squamous cell carcinoma and |
| | endocervical adenocarcinoma |
| LUAD (n = 517) | lung adenocarcinoma |
| LAML (n = 173) | acute myeloid leukemia |
| ESCA (n = 185) | esophageal carcinoma |
| LUSC (n = 502) | lung squamous cell carcinoma |
| READ (n = 95) | rectum adenocarcinoma |
| COAD (n = 288) | colon adenocarcinoma |
| BRCA (n = 1104) | breast invasive carcinoma |
| LIHC (n = 373) | liver hepatocellular carcinoma |

[0437] In which n is the number of patient samples for that cancer type in TCGA dataset. Anti-ICOS antibodies described herein may be used for treatment of these and other cancers.

[0438] Cancers that are associated with a relatively high level of ICOS+immunosuppressive Tregs and which further express PD-L1 may respond especially well to treatment with a combination of anti-ICOS antibody and anti-PD-L1 antibody. Appropriate treatment regiments and antibodies for this purpose have already been detailed in the foregoing description.

[0439] Using the TCGA dataset as before, enrichment scores for ICOS and FOXP3 were correlated with expression levels of PD-L1 using Spearman's rank correlation and grouped by primary disease indication. P-values were calculated for each group and a p-value of 0.05 (with Bonferroni's multiple comparison correction) was taken as statistically significant. The disease groups with the highest correlations between ICOS/FOXP3 and PD-L1 expression were:

| | |
|---|---|
| TGCT (n = 156) | testicular germ cell tumour |
| COAD (n = 288) | colon adenocarcinoma |
| READ (n = 95) | rectum adenocarcinoma |
| BLCA (n = 407) | bladder urothelial carcinoma |
| OV (n = 308) | ovarian serous cystadenocarcinoma |
| BRCA (n = 1104) | breast invasive carcinoma |
| SKCM (n = 473) | skin cutaneous melanoma |
| CESC (n = 305) | cervical squamous cell carcinoma and |
| | endocervical adenocarcinoma |
| STAD (n = 415) | stomach adenocarcinoma |
| LUAD (n = 517) | lung adenocarcinoma |

[0440] Patients may be selected for treatment following an assay determining that their cancer is associated with ICOS+immunosuppressive Tregs and expression of PD-L1. For cancer types in which, as above, there is a high correlation score, it may suffice to determine that one of ICOS+immunosuppressive Tregs and expression of PD-L1 is present (e.g., above a threshold value). PD-L1 immunohistochemistry assays may be used in this context.

### 1.14. Example 7: Assessment of Further Anti-ICOS Antibodies

[0441] CL-74570 and CL-61091 antibody sequences were synthesised and expressed in IgG1 format in HEK cells.

[0442] Functional characterisation of these antibodies was performed using an HTRF assay as described previously (see, e.g. Example 6 of U.S. Pat. No. 9,957,323), with modifications to adapt the assay to use of purified IgG1 rather than BCT supernatant. 5 μL of supernatant containing human IgG1 antibodies expressed from HEK cells was used in place of the BCT supernatant, and the total volume made up to 20 μl per well using HTRF buffer as before. A human IgG1 antibody was used as a negative control. Both antibodies exhibited greater than 5% effect for binding to human and mouse ICOS as calculated using Equation 1 and were therefore confirmed to test positive in this assay.

[0443] Ability of these antibodies to bind human and mouse ICOS expressed on the surface of CHO-S cells was further confirmed using a Mirrorball assay. In this assay, 5 μl supernatant containing the anti-ICOS IgG1 was transferred to each well of 384 mirrorball black plates (Corning). Binding of anti-ICOS antibodies was detected by adding 10 μl of goat anti-human 488 (Jackson Immunoresearch) diluted in assay buffer (PBS+1% BSA+0.1% Sodium Azide) at a concentration of 0.8 mg/ml to all wells.

[0444] For positive control wells, 54 reference antibody diluted in assay media to 2.2 μg/mL was added to the plates. For negative control wells, 5 μl of Hybrid control IgG1 diluted in assay media to 2.2 μg/mL was added to the plates. 10 μM of DRAQS (Thermoscientific) was added to 0.4×10⁶/ml cells resuspended in assay buffer and 5 μl was added to all wells. Plates were incubated for 2 hr at 4 degrees.

[0445] Fluorescence intensity was measured using Mirrorball plate reader (TTP Labtech), measuring Alexafluor 488 (excitation 493 nm, emission 519 nm) from a population of 500-700 single cells. Assay signal was measured as Median (FL2) Mean Intensity.

[0446] Total binding was defined using reference antibody at an assay concentration of 2.2 μg/mL. Non-specific binding was defined using Hybrid control hIgG1 at an assay concentration of 2.22 μg/mL. Both antibodies exhibited greater than 1 percent effect and were therefore confirmed to test positive in this assay.

$$Percent effect = \frac{( sample well - non ‐ specific binding )}{( total binding - non ‐ specific binding )} ⨯ 100$$

[0447] Each of CL-74570 and CL-61091 also demonstrated binding to human and mouse ICOS expressed on CHO-S cells as determined by flow cytometry. FACS screening was performed using purified IgG1 rather than BCT supernatant. Both antibodies exhibited binding >10 fold above the average of geomean of the negative control binding to hICOS, mICOS and WT CHO cells.

TABLE E26-1
Functional characterisation of CL-74570 and CL-61091.

| Primary Screen | | | | | | |
|---|---|---|---|---|---|---|
| | | Mirrorball | | Secondary screen | | |
| HTRF (Protein) | | (ICOS CHO Cell) | | FACS | | |
| Human | Mouse | Human | Mouse | Human | Mouse | |
| 1:100 dil | 1:100 dil | 1:100 dil | 1:100 dil | ICOS CHO | ICOS CHO | |
| Percent | Percent | Percent | Percent | (1:10 dil) | (1:10 dil) | |
| Effect | Effect | Effect | Effect | % Binding- | % Binding- | Clone |
| [%] | [%] | [%] | [%] | APC | APC | ID |
| 94.42 | 60.86 | 107.02 | 127.03 | 122.97 | 96.41 | CL- |
| | | | | | | 74570 |
| 83.43 | 76.65 | 54.14 | 113.10 | 19.08 | 62.94 | CL- |
| | | | | | | 61091 |

### 1.15. Example 8: Clinical Trial Phase I/II Open-Label Study of KY1044

[0448] A phase I/II open-label study of KY1044, an anti-ICOS antibody with dual mechanism of action, as single agent and in combination with atezolizumab, was performed on adult patients with advanced malignancies. Participants included patients with advanced/metastatic malignancies who have had measurable disease (non-measurable disease was allowed only in Phase I) as determined by Response Evaluation Criteria in Solid Tumours version 1.1 (RECIST 1.1) and were eligible if, according to the National Comprehensive Cancer Network (NCCN) guidelines, there were no available therapies known to confer a clinical benefit for their disease, or they had exhausted all such available options.

[0449] 1.15.1. Methods

[0450] Study Arms:
[0451] KY1044 monotherapy phase I: KY1044 monotherapy dose escalation
[0452] KY1044 and atezolizumab phase I: KY1044 and atezolizumab combination dose escalation
[0453] KY1044 monotherapy phase II: KY1044 monotherapy
[0454] KY1044 and atezolizumab phase II: KY1044 and atezolizumab combination

[0455] Phase I: Participants with advanced/metastatic malignancies, and preferred indications (non-small cell lung cancer (NSCLC), head and neck squamous cell carcinoma (HNSCC), hepatocellular carcinoma (HCC), melanoma, cervical cancer, esophageal cancer, gastric cancer, renal cell carcinoma, pancreatic cancer, and triple negative breast cancer).

[0456] Phase II KY1044 single agent: Participants with advanced/metastatic malignancies in indications in which signs of anti-tumour activity (Complete Response (CR), Partial Response (PR) or durable stable disease (SD) with tumour shrinkage that does not qualify for PR) were seen during the dose escalation of KY1044 as single agent.

[0457] Phase II KY1044 in combination with atezolizumab: Participants with advanced/metastatic malignancies in the selected indications below, and/or indications which have shown promising activity in Phase I:
[0458] NSCLC (anti-PD-(L)1 therapy naïve and pre-treated)
[0459] Gastric (anti-PD-(L)1 therapy naïve and pre-treated)
[0460] HNSCC (anti-PD-(L)1 therapy naïve and pre-treated)
[0461] Esophageal (anti-PD-(L)1 therapy naïve and pre-treated)
[0462] Cervical (anti-PD-(L)1 therapy naïve and pre-treated)
[0463] Indications, in which signs of anti-tumor activity has been observed in Phase I with KY1044 in combination with atezolizumab.

[0464] Patients with advanced/metastatic malignancies received escalating doses of KY1044 as a single agent or in combination with 1200 mg of anti-PD-L1 antibody, atezolizumab, by IV infusion every 3 weeks until disease progression or unacceptable toxicity. Dose escalation was guided by a modified toxicity probability interval design. The primary objective was to determine safety, tolerability, and maximum tolerated dose. Cohorts that were tolerated were later enriched with more subjects. Adverse events (AEs) were classified according to Common Terminology Criteria for Adverse Events version 5 (CTCAE v5) and efficacy measures performed according to Response Evaluation Criteria in Solid Tumours version 1.1 (RECIST v1.1) every 8 weeks for the first 16 weeks and then every 12 weeks.

[0465] 1.15.2. Patient Inclusion Criteria:

Participants must have met all of the following additional inclusion criteria:
[0466] 1. Prior therapy with anti-PD-(L)1 and/or anti-PD-L1 inhibitors was allowed provided any toxicity attributed to prior anti-PD-(L)1 and/or anti-PD-L1-directed therapy did not lead to discontinuation of therapy;
[0467] 2. Eastern Cooperative Oncology Group (ECOG) Performance Status 0-1;
[0468] 3. Life expectancy longer than 12 weeks; and
[0469] 4. A site of disease amenable to biopsy and be a candidate for tumour biopsy according to the treating institution's guidelines.

[0470] 1.15.3. Patient Exclusion Criteria:

[0471] Patients must not have had any of the following exclusion criteria:
[0472] 1. Presence of symptomatic central nervous system (CNS) metastases, or CNS metastases that require local CNS-directed therapy, or increasing doses of corticosteroids within the prior 2 weeks of first dose of study treatment;
[0473] 2. History of severe hypersensitivity reactions to other monoclonal antibodies and/or their excipients;
[0474] 3. Known presence of neutralizing anti-atezolizumab antibodies (for patients previously treated with atezolizumab);
[0475] 4. Having out of range laboratory values: creatinine, bilirubin, alanine aminotransferase (ALT), aspartate aminotransferase (AST), absolute neutrophil count (ANC), platelet count, hemoglobin;
[0476] 5. Impaired cardiac function or clinically significant cardiac disease;
[0477] 6. Known human immunodeficiency virus (HIV), active hepatitis B virus (HBV) or active hepatitis C virus (HCV) infection;
[0478] 7. Malignant disease, other than that being treated in this study;
[0479] 8. Any medical condition that would, in the Investigator's judgment, prevent participation in the clinical study due to safety concerns, compliance with clinical study procedures or interpretation of study results;
[0480] 9. Active autoimmune disease or a documented history of autoimmune disease;
[0481] 10. Participants previously exposed to anti-PD-(L)1 treatment who are not adequately treated for skin rash or had no replacement therapy for endocrinopathies should be excluded;
[0482] 11. Participants with a history of drug-induced pneumonitis or current pneumonitis;
[0483] 12. Systemic steroid therapy or any immunosuppressive therapy. Topical, inhaled, nasal, and ophthalmic steroids are not prohibited;
[0484] 13. Use of life attenuated vaccines against infectious diseases within 4 weeks of the first dose of study treatment;
[0485] 14. Anti-CTLA4, anti-PD-(L)1 treatment within 4 weeks of the first dose of study treatment;
[0486] 15. Pre-treatment with anti-CTLA4 antibodies in combination with any other antibody or drug specifically targeting T-cell co-stimulation or checkpoint pathway;
[0487] 16. Presence of Common Terminology Criteria for Adverse Events version 5 (CTCAE v5)≥Grade 2 toxicity (except alopecia, peripheral neuropathy and ototoxicity, which are excluded if CTCAE v5≥Grade 3) due to prior cancer therapy;
[0488] 17. Radiotherapy within 2 weeks of the first dose of study treatment, except for palliative radiotherapy to a limited field, such as for the treatment of bone pain or a focally painful tumour mass. To allow evaluation for response to treatment, participants enrolled in the Phase II part must have remaining measurable disease that has not been irradiated; and
[0489] 18. Pregnant or lactating women.

[0490] 1.15.4. Dosing

[0491] KY1044 was administered at a dose of 0.8 mg, 2.4 mg, 8 mg, 24 mg, 80 mg, or 240 mg, every three weeks, as a single agent or in combination with 1200 mg of atezolizumab.

[0492] 1.15.5. Interim Results

[0493] 103 patients were enrolled in the study (38 patients as monotherapy in 6 cohorts at doses ranging from 0.8 to 240 mg and 65 in combination with atezolizumab in 5 cohorts at doses 0.8-80 mg). 63% and 55% of patients received >4 prior anti-cancer therapies in the single agent and combination cohorts, respectively.

[0494] All cohorts were completed without dose limiting toxicities (DLTs) during the first 21 days of treatment. In the KY1044 single agent cohorts, 47.4% of patients experienced treatment-related AEs (TRAEs), all were Grades 1 or 2. In the combination cohorts, TRAEs were observed in 58% of patients. Most of the TRAEs were Grade 1 or 2 apart from 8 TRAEs that were ≥Grade 3 occurring in <8% of patients. Infusion-related reactions, pyrexia and lymphopenia were the most commonly occurring TRAEs in ≥10% of patients. TRAE leading to dose interruptions occurred in 1 patient in the single agent cohort and in 4 patients in the combination cohort. Only 1 patient discontinued treatment due to myositis that was considered related to the combination.

[0495] Preliminary KY1044 data from 69 patients agreed with the pharmacokinetic (PK) model predictions.

[0496] 1.15.6. Conclusion:

[0497] These results indicate that KY1044 was well tolerated as a single agent and in combination with atezolizumab.

### 1.16. Example 9: Clinical Trial Preliminary Pharmacodynamic Markers from Phase I/II Multicenter Trial

[0498] Longitudinal blood samples were used to correlate KY1044 target engagement levels with pharmacodynamic (PD) properties in the circulation.

[0499] 1.16.1. Methods:

[0500] Phase I/II subjects, described in Example 8, were enrolled in dose escalation and enrichment cohorts to evaluate the effect of KY1044 as monotherapy (0.8-240 mg) every three weeks and in combination (0.8-80 mg) with atezolizumab (1200 mg) every three weeks. Peripheral blood mononuclear cells (PBMCs), plasma, and tumour biopsies were collected over the first 3 cycles to confirm target engagement and KY1044 method of action (MoA). The sample analysis included: circulating T cell receptor occupancy by chip-cytometry; PBMC and tumour sample pre- and post-treatment transcriptomic analysis; and the assessment of circulating cytokines (e.g., GM-CSF and TNFα).

[0501] 1.16.2. Interim Results:

[0502] As assessed in PBMCs, full/prolonged ICOS target engagement on T cells was confirmed in subjects that received higher flat doses of 8 to 240 mg of KY1044, while partial/transient saturation was observed in subjects that received lower flat doses (0.8-2.4 mg). ICOS target engagement was quantified as the percentage occupancy on CD4 memory cells as measured by chip cytometry from patient blood plasma samples. The target engagement was not affected by atezolizumab. FIGS. 16A and 16B show percentage occupancy on CD4 memory for patients receiving different dose levels.

[0503] KY1044-dependent agonism was indirectly assessed by measuring circulating cytokine levels. GM-CSF and TNFα levels were assessed over the first 3 cycles and compared to values at baseline. A post-dosing transient induction of GM-CSF was evident in subjects dosed with 0.8 mg and 2.4 mg KY1044, whereas minimal induction was observed at a dose of 8 mg and higher. See FIG. 17A. A post-dosing transient induction of TNFα was also evident in subjects dosed with KY1044 at the 0.8 and 2.4 mg dose, whereas minimal induction was observed at dose of 8 mg and higher. See FIG. 17B. No association was observed between treatment and IFNγ levels.

[0504] 1.16.3. Conclusion:

[0505] Lower doses of KY1044 (0.8 mg and 2.4 mg), which resulted in partial receptor occupancy, induced a stronger GM-SCF and TNFα signal after treatment. Dosing KY1044 in an amount that achieves less than complete receptor occupancy may therefore be advantageous insofar as it generates a pulsing cytokine response, with higher post-dosing peaks of cytokine levels on repeat administration of the lower dose levels as compared with higher dose levels.

### 1.17. Example 10: Longitudinal Pharmacodynamic Data Confirms Expected KY1044 Method of Action

[0506] Longitudinal samples were used to correlate KY1044 target engagement levels with pharmacodynamic (PD) properties (e.g., dual method of action) in the tumour microenvironment (TME).

[0507] 1.17.1. Methods

[0508] Phase I/II subjects, described in Example 8, were enrolled in dose escalation and enrichment cohorts to evaluate the effect of KY1044 as monotherapy (0.8-240 mg) every three weeks and in combination (0.8-80 mg) with atezolizumab (1200 mg) every three weeks. Peripheral blood mononuclear cells (PBMCs), plasma, and tumour biopsies were collected over the first 3 cycles to confirm target engagement and KY1044 method of action (MoA). The sample analysis included: immunohistochemistry (IHC) of tumour samples (ICOS, FOXP3 and CD8) and circulating T cell immunoprofiling.

[0509] 1.17.2. Interim Results:

[0510] The immune cell profiling showed changes in some populations, but there was no significant depletion of peripheral ICOS+ cells. In contrast, pre- and post-treatment IHC analysis of ICOS+/FOXP3+ cells in tumour biopsies confirmed a KY1044-dose dependent reduction of ICOS+ Tregs and maintenance of CD8+ T cells in the TME, with the highest intratumoral ICOS+ Treg depletion observed with doses of 8 mg and above. KY1044 reduced ICOS+ Tregs and improved the ratio of CD8 to ICOS+ Tregs at all tested doses in the TME, plateauing from subjects receiving a KY1044 dose of 8 mg or higher. These results indicate that KY1044 directed agonism is most evident at lower doses (0.8 mg and 2.4 mg), which are the doses that achieved partial ICOS receptor occupancy.

[0511] 1.17.3. Conclusion:

[0512] Longitudinal PD data confirmed the KY1044 method of action, namely ICOS+ Treg depletion and increase CD8+/ICOS+ Treg ratio in the TME as well as T cell co-stimulation. These results, together with those reported in Example 9, support a dual method-of-action of KY1044. Without being bound by theory, lower doses of KY1044 (e.g., <8 mg, e.g., 2.4 mg or 0.8 mg) may stimulate an increase in cytokine response (increase in pro-inflammatory cytokines GM-CSF and TNFα) and simultaneously mediate an intra-tumoural reduction in ICOS+ Tregs and improve the ratio of CD8 to ICOS+ Tregs.

### 1.18. Example 11: Interim Results from Phase I/II Trial: Partial and Complete Responses to Combination Therapy

[0513] 1.18.1. Methods

[0514] Methods used are recited in Example 8.

[0515] 1.18.2. Patient Inclusion Criteria:

[0516] Patients were enrolled as described in Example 8.

[0517] 1.18.3. Interim Results:

[0518] Interim results from the Phase I/II show signs of anti-tumour activity. Partial responses (PR) or complete responses (CR) were observed in the trial. Objective responses documented include:

| | |
|---|---|
| CR in triple negative | 2.4 mg KY1044 + 1200 mg atezo |
| breast cancer (TNBC) | |
| PR in TNBC | 2.4 mg KY1044 + 1200 mg atezo |
| PR in head and neck | 8 mg KY1044 + 1200 mg atezo |
| squamous cell carcinoma | |
| PR in penile cancer | 24 mg KY1044 + 1200 mg atezo |
| PR in pancreatic cancer | 0.8 mg KY1044 + 1200 mg atezo |

[0519] The KY1044 dose administered to these patients (with 1200 mg atezolizumab) is indicated.

[0520] Complete response was defined according to RECIST 1.1 and irRESIST as follows: Complete response (CR): disappearance of all target lesions. Any pathological lymph nodes (whether target or nontarget) must have reduction in short axis to <10 mm. CR: disappearance of all nontarget lesions and (if applicable) normalization of tumor marker level). All lymph nodes must be non-pathological in size (<10 mm short axis).

[0521] Partial response was defined according to RECIST 1.1 and iRESIST as follows: Partial response (PR): at least a 30% decrease in the sum of diameters of target lesions, taking as reference the baseline sum of diameters. Non-CR/Non-PD: persistence of one or more nontarget lesion(s) and/or (if applicable) maintenance of tumor marker level above the normal limits.

[0522] 1.18.4. Conclusion:

[0523] The anti-ICOS antibody KY1044 promotes the efficacy of anti-PD-L1 antibody therapy.

### 1.19. Example 12: Interim Results from Phase I/II Trial: Treatment Duration

[0524] 1.19.1. Methods

[0525] Methods used are recited in Example 8. Briefly, patients with advanced/metastatic malignancies received doses of KY1044 as a single agent or in combination with 1200 mg of the anti-PD-L1 antibody atezolizumab, by IV infusion every 3 weeks until disease progression or unacceptable toxicity.

[0526] 1.19.2. Patient Inclusion Criteria:

[0527] Patients were enrolled as described in Example 8.

[0528] 1.19.3. Interim Results:

[0529] Median duration of treatment for all enrolled patients was 9 weeks. Treatment duration ≥16 weeks was observed in 24% (9/38) and 27% (17/64) patients in the single agent and combination cohorts, respectively. Further data on treatment duration for monotherapy and combination therapy are provided in FIG. 18A. For example, FIG. 18A shows that a treatment duration of ≥20 weeks was observed in 18% (7/38) of patients treated with KY1044 as a single agent and in 10% (11/110) of patients treated with combination therapy.

[0530] In FIG. 18B, the data in FIG. 18A are further stratified according to partial or complete saturation (receptor occupancy), which were obtained by lower (0.8 or 2.4 mg) or higher (≥8 mg) doses of KY1044, respectively. A treatment duration of ≥20 weeks was observed in 22% (2/9) of patients that received a lower dose (0.8 mg or 2.4 mg) of KY1044 as a single agent, which resulted in partial receptor occupancy. A treatment duration of ≥20 weeks was observed in 17% (5/29) of patients that received a higher dose (≥8 mg) of KY1044 as a single agent. Treatment duration of ≥20 weeks was observed in 8% (4/49) of patients that received a lower dose (0.8 mg or 2.4 mg) of KY1044 in combination with atezolizumab (1200 mg). Treatment duration of ≥20 weeks was observed in 11% (7/61) of patients that received a higher dose (≥8 mg) of KY1044 in combination with atezolizumab (1200 mg). See FIG. 18B. Further, a treatment duration of ≥20 weeks was observed in 10% (6/58) of patients that received KY1044 at a dose that resulted in partial receptor occupancy (0.8 mg or 2.4 mg KY1044). Treatment duration of ≥20 weeks was observed in 13% (12/90) of patients that received KY1044 at a dose that resulted in complete receptor occupancy (≥8 mg). See FIG. 18C.

[0531] 1.19.4. Conclusion:

[0532] These data support the surprising efficacy of lower doses (e.g., 0.8 mg, 2.4 mg) of the anti-ICOS antibody KY1044, especially in combination with an anti-PD-L1 antibody therapy.

### 1.20. Example 13: KY1044 in Combination with Atezolizumab in HNSCC Patients

[0533] 1.20.1. Methods

[0534] In this stage of the study, Phase 2 cohorts (2 cohorts, PD-L1 naïve and pretreated) are being initiated in pts with head and neck squamous cell carcinoma (HNSCC). Approximately 40 pts will be enrolled in each cohort. Methods used are recited in Example 8. Efficacy measures will be performed as per Response Evaluation Criteria in Solid Tumours version 1.1 (RECIST 1.1) every 8 weeks for the first 16 weeks and then every 12 weeks, while adverse events (AEs) will be classified according to Common Terminology Criteria for Adverse Events version 5 (CTCAE v5).

[0535] 1.20.2. Inclusion/Exclusion Criteria

[0536] Key inclusion criteria: anti-PD-L1 therapy naïve and pre-treated, 1-2 prior lines of systemic therapy for advanced disease, histologically documented advanced/metastatic malignancies, measurable disease by RECIST 1.1, site of disease amenable to biopsy.

[0537] Key exclusion criteria: CNS metastases, active autoimmune disease, significant heart disease and/or QT prolongation, steroid therapy, or any immunosuppressive therapy.

[0538] 1.20.3. Interim Results:

[0539] KY1044 was well tolerated and showed initial signs of activity for HNSCC treatment. In the Phase 1 stage of the study, a 59-year-old male patient with HPV+HNSCC who had progressed on 5 prior lines of therapy (including nivolumab), experienced a partial response (42% tumor shrinkage), which was still holding as of cycle 26 day 1 (C26D1), and on treatment for >20 months (as of Feb. 10, 2022).

[0540] 1.20.4. Conclusion:

[0541] The strong expression of ICOS on intratumoral Tregs in head and neck cancer (Sainson R et al. Cancer Immunol Res. 8, 2020:1568-82) as well as the promising clinical activity in one HNSCC patient (Patel M R et al. J Clinical Oncology 39, 2021 (suppl 15; abstract 2624) with a treatment duration of >20 months suggest HNSCC to be a favorable indication for KY1044 (SAR445256).

### REFERENCES

[0542] 1 Hutloff A, et al. ICOS is an inducible T-cell co-stimulator structurally and functionally related to CD28. Nature. 1999 Jan. 21; 397(6716):263-6.
[0543] 2 Beier K C, et al. Induction, binding specificity and function of human ICOS. Eur J Immunol. 2000 December; 30(12):3707-17.
[0544] 3 Coyle A J, et al. The CD28-related molecule ICOS is required for effective T cell-dependent immune responses. Immunity. 2000 July; 13(1):95-105.
[0545] 4 Dong C, et al. ICOS co-stimulatory receptor is essential for T-cell activation and function. Nature. 2001 Jan. 4; 409(6816):97-101.
[0546] 5 Mak T W, et al. Costimulation through the inducible costimulator ligand is essential for both T helper and B cell functions in T cell-dependent B cell responses. Nat Immunol. 2003 August; 4(8):765-72.
[0547] 6 Swallow M M, Wallin J J, Sha W C. B7h, a novel costimulatory homolog of B7.1 and B7.2, is induced by TNFalpha. Immunity. 1999 October; 11(4):423-32.
[0548] 7 Wang S, et al. Costimulation of T cells by B7-H2, a B7-like molecule that binds ICOS. Blood. 2000 Oct. 15; 96(8):2808-13.
[0549] 8 Conrad C, Gilliet M. Plasmacytoid dendritic cells and regulatory T cells in the tumor microenvironment: A dangerous liaison. Oncoimmunology. 2013 May 1; 2(5):e2388.
[0550] 9 Simpson et al., Fc-dependent depletion of tumor-infiltrating regulatory T cells co-defines the efficacy of anti-CTLA-4 therapy against melanoma. J. Exp. Med. 210(9):1695-1710 2013
[0551] 10 Fu T, He Q, Sharma P. The ICOS/ICOSL pathway is required for optimal antitumor responses mediated by anti-CTLA-4 therapy. Cancer Res. 2011 Aug. 15; 71(16):5445-54.
[0552] 11 Fan X, Quezada S A, Sepulveda M A, Sharma P, Allison J P. Engagement of the ICOS pathway markedly enhances efficacy of CTLA-4 blockade in cancer immunotherapy. J Exp Med. 2014 Apr. 7; 211(4):715-25.
[0553] 12 Carthon, B. C., et al. Preoperative CTLA-4 blockade: Tolerability and immune monitoring in the setting of a presurgical clinical trial. Clin. Cancer Res. 16:2861-2871.
[0554] 13 Liakou C I, et al. CTLA-4 blockade increases IFNgamma-producing CD4+ICOShi cells to shift the ratio of effector to regulatory T cells in cancer patients. Proc Natl Acad Sci USA. 2008 Sep. 30; 105(39):14987-92.
[0555] 14 Vonderheide, R. H., et al. 2010. Tremelimumab in combination with exemestane in patients with advanced breast cancer and treatment-associated modulation of inducible costimulator expression on patient T cells. Clin. Cancer Res. 16:3485-3494.
[0556] 15 Preston C C, et al., The ratios of CD8+ T cells to CD4+CD25+FOXP3+ and FOXP3− T cells correlate with poor clinical outcome in human serous ovarian cancer. PLoS One November 14; 8(11):e80063.
[0557] 16 Hodi F S, et al., Immunologic and clinical effects of antibody blockade of cytotoxic T lymphocyte-associated antigen 4 in previously vaccinated cancer patients. PNAS 2008 Feb. 26; 105(8):3005-10
[0558] 17 Chattopadhyay et al., Structural Basis of Inducible Costimulatory Ligand Function: Determination of the Cell Surface Oligomeric State and Functional Mapping of the Receptor Binding Site of the Protein, J. Immunol. 177(6):3920-3929 2006
[0559] 18 Lefranc M P, IMGT unique numbering for immunoglobulin and T cell receptor variable domains and Ig superfamily V-like domains, Dev Comp Immunol. 27(1):55-77 2003
[0560] 19 Gill et al., “Antibody-Dependent Phagocytosis of Tumor Cells by Macrophages: A Potent Effector Mechanism of Monoclonal Antibody Therapy of Cancer”, Cancer Res., 75(23), Dec. 1, 2015
[0561] 20 Lazar et al., 2006, Proc. Natl. Acad. Sci. U.S.A., March 14; 103(11):4005-10
[0562] 21 Dall et al., Immunol 2002; 169:5171-5180
[0563] 22 Natsume et al., 2009, Drug Des. Devel. Ther., 3:7-16 or by Zhou Q., Biotechnol. Bioeng., 2008, February 15, 99(3):652-65)
[0564] 23 Shields et al., 2001, J. Biol. Chem., March 2; 276(9):6591-604)
[0565] 24 Idusogie et al., J. Immunol., 2001, 166:2571-2575
[0566] 25 Natsume et al., 2008, Cancer Res., 68: 3863-3872
[0567] 26 Alexandrov L B, et al. Signatures of mutational processes in human cancer. Nature. 2013 Aug. 22; 500(7463):415-21
[0568] 27 Martin-Orozco et al., Melanoma Cells Express ICOS Ligand to Promote the Activation and Expansion of T-Regulatory Cells, Cancer Research 70(23):9581-9590 2010
[0569] 28 Houot et al., Therapeutic effect of CD137 immunomodulation in lymphoma and its enhancement by Treg depletion, Blood 114:3431-3438 2009
[0570] 29 Baruch K. et al. PD-1 immune checkpoint blockade reduces pathology and improves memory in mouse models of Alzheimer's disease. Nat Med 22(2):137-137 2016
[0571] 30 Curran et al., PD01 and CTLA-4 combination blockade expands infiltrating T cells and reduces regulatory T and myeloid cells within B16 melanoma tumours, PNAS 107(9):4275-4280 2010
[0572] 31 Sim et al., IL-2 therapy promotes suppressive ICOS+Treg expansion in melanoma patients, J Clin Invest 2014
[0573] 32 Sim et al., IL-2 variant circumvents ICOS+ regulatory T cell expansion and promotes NK cell activation, Cancer Immunol Res 2016
[0574] 33 Kroemer et al. Immunologic Cell Death in Cancer Therapy, Ann Rev Immunol. 31:51-72 2013
[0575] 34 Galluzzi, Zitvogel & Kroemer Canc. Imm. Res. 4:895-902 2016
[0576] 35 Bos et al., Transient regulatory T cell ablation deters oncogene-driven breast cancer and enhances radiotherapy, J Exp Med 210(11):2434-2446 2013
[0577] 36 Sato et al., Spatially selective depletion of tumor-associated regulatory T cells with near-infrared photoimmunotherapy, Science Translational Medicine 8(352) 2016
[0578] 37 Crotty S. T follicular helper cell differentiation, function, and roles in disease. Immunity. 2014 Oct. 16; 41(4):529-42.
[0579] 38 Shields et al. (2002) JBC 277:26733
[0580] 39 Lee et al, Nature Biotechnology, 32:6-363, 2014
[0581] 40 Yusa K, Zhou L, Li M A, Bradley A, Craig N L. A hyperactive piggyBac transposase for mammalian applications, Proc Natl Acad Sci USA. 2011 Jan. 25
[0582] 41 Kilpatrick et al., Rapid development of affinity matured monoclonal antibodies using RIMMS; Hybridoma; 16(4):381-9 Aug. 1997
[0583] 42 Simpson, T. R. et al., Fc-dependent depletion of tumor-infiltrating regulatory T cells co-defines the efficacy of anti-CTLA-4 therapy against melanoma. The Journal of experimental medicine, 210(9):1695-710 2013
[0584] 43 Selby, M. J. et al., Anti-CTLA-4 antibodies of IgG2a isotype enhance antitumor activity through reduction of intratumoral regulatory T cells. Cancer immunology research, 1(1):32-42 2013.
[0585] 44 Rubio V., et al. Ex vivo identification, isolation and analysis of tumor-cytolytic T cells. Nat Med. 2003 November; 9(11):1377-82.
[0586] 45 Nair & Jacob., A simple practice guide for dose conversion between animals and human. J Basic Clin Pharma 2016; 7:27-31
[0587] 46 D. A. Barbie, et al., “Systematic RNA interference reveals that oncogenic KRAS-driven cancers require TBK1.,” Nature, vol. 462, no. 7269, pp. 108-12, 2009
[0588] 47 S. Hanzelmann, R. Castelo, and J. Guinney, “GSVA: gene set variation analysis for microarray and RNA-Seq data,” BMC Bioinformatics, vol. 14, no. 1, p. 7, 2013

[0589] 1.21. Sequences

Antibody STIM001
VH domain nucleotide sequence:
SEQ ID NO: 367
CAGGTTCAGGTGGTGCAGTCTGGAGCTGAGGTGAA
GAAGCCTGGGGCCTCAGTGAAGGTCTCCTGCAAGG
CTTCTGGTTACACCTTTTCCACCTTTGGTATCACC
TGGGTGCGACAGGCCCCTGGACAAGGGCTTGAATG
GATGGGATGGATCAGCGCTTACAATGGTGACACAA
ACTATGCACAGAATCTCCAGGGCAGAGTCATCATG
ACCACAGACACATCCACGAGCACAGCCTACATGGA
GCTGAGGAGCCTGAGATCTGACGACACGGCCGTTT
ATTACTGTGCGAGGAGCAGTGGCCACTACTACTAC
TACGGTATGGACGTCTGGGGCCAAGGGACCACGGT
CACCGTCTCCTCA
VH domain amino acid sequence:
SEQ ID NO: 366
QVQVVQSGAEVKKPGASVKVSCKASGYTFSTFGIT
WVRQAPGQGLEWMGWISAYNGDTNYAQNLQGRVIM
TTDTSTSTAYMELRSLRSDDTAVYYCARSSGHYYY
YGMDVWGQGTTVTVSS
VH CDR1 amino acid sequence:
SEQ ID NO: 363
GYTFSTFG
VH CDR2 amino acid sequence:
SEQ ID NO: 364
ISAYNGDT
VH CDR3 amino acid sequence:
SEQ ID NO: 365
ARSSGHYYYYGMDV
VL domain nucleotide sequence:
SEQ ID NO: 374
GATATTGTGATGACTCAGTCTCCACTCTCCCTGCC
CGTCACCCCTGGAGAGCCGGCCTCCATCTCCTGCA
GGTCTAGTCAGAGCCTCCTGCATAGTAATGAATAC
AACTATTTGGATTGGTACCTGCAGAAGCCAGGGCA
GTCTCCACAGCTCCTGATCTTTTTGGGTTCTAATC
GGGCCTCCGGGGTCCCTGACAGGTTCAGTGGCAGT
GGATCAGGCACAGATTTTACACTGAAAATCACCAG
AGTGGAGGCTGAGGATGTTGGAATTTATTACTGCA
TGCAATCTCTACAAACTCCGCTCACTTTCGGCGGA
GGGACCAAGGTGGAGATCAAA
VL domain amino acid sequence:
SEQ ID NO: 373
DIVMTQSPLSLPVTPGEPASISCRSSQSLLHSNEY
NYLDWYLQKPGQSPQLLIFLGSNRASGVPDRFSGS
GSGTDFTLKITRVEAEDVGIYYCMQSLQTPLTFGG
GTKVEIK
VL CDR1 amino acid sequence:
SEQ ID NO: 370
QSLLHSNEYNY
VL CDR2 amino acid sequence:
SEQ ID NO: 371
LGS
VL CDR3 amino acid sequence:
SEQ ID NO: 372
MQSLQTPLT
Antibody STIM002
VH domain nucleotide sequence:
SEQ ID NO: 381
CAGGTTCAACTGGTGCAGTCTGGAGGTGAGGTGAA
GAAGCCTGGGGCCTCAGTGAAGGTCTCCTGCAAGG
CTTCTGGTTACACCTTTACCAGCTATGGTTTCAGC
TGGGTGCGACAGGCCCCTGGACAAGGACTAGAGTG
GATGGGATGGATCAGCGCTTACAATGGTAACACAA
ACTATGCACAGAAGCTCCAGGGCAGAGTCACCATG
ACCACAGACACATCCACGAGCACAGCCTACATGGA
GCTGAGGAGCTTGAGATCTGACGACACGGCCGTGT
ATTACTGTGCGAGATCTACGTATTTCTATGGTTCG
GGGACCCTCTACGGTATGGACGTCTGGGGCCAAGG
GACCACGGTCACCGTCTCCTCA
VH domain amino acid sequence:
SEQ ID NO: 380
QVQLVQSGGEVKKPGASVKVSCKASGYTFTSYGFS
WVRQAPGQGLEWMGWISAYNGNTNYAQKLQGRVTM
TTDTSTSTAYMELRSLRSDDTAVYYCARSTYFYGS
GTLYGMDVWGQGTTVTVSS
VH CDR1 amino acid sequence:
SEQ ID NO: 377
GYTFTSYG
VH CDR2 amino acid sequence:
SEQ ID NO: 378
ISAYNGNT
VH CDR3 amino acid sequence:
SEQ ID NO: 379
ARSTYFYGSGTLYGMDV
VL domain nucleotide sequence: 388
GATATTGTGATGACTCAGTCTCCACTCTCCCTGCC
CGTCACCCCTGGAGAGCCGGCCTCCATCTCCTGCA
GGTCTAGTCAGAGCCTCCTGCATAGTGATGGATAC
AACTGTTTGGATTGGTACCTGCAGAAGCCAGGGCA
GTCTCCACAGCTCCTGATCTATTTGGGTTCTACTC
GGGCCTCCGGGTTCCCTGACAGGTTCAGTGGCAGT
GGATCAGGCACAGATTTTACACTGAAAATCAGCAG
AGTGGAGGCTGAGGATGTTGGGGTTTATTACTGCA
TGCAAGCTCTACAAACTCCGTGCAGTTTTGGCCAG
GGGACCAAGCTGGAGATCAAA
Corrected STIM002 VL domain nucleotide
sequence:
SEQ ID NO: 519
GATATTGTGATGACTCAGTCTCCACTCTCCCTGCC
CGTCACCCCTGGAGAGCCGGCCTCCATCTCCTGCA
GGTCTAGTCAGAGCCTCCTGCATAGTGATGGATAC
AACTATTTGGATTGGTACCTGCAGAAGCCAGGGCA
GTCTCCACAGCTCCTGATCTATTTGGGTTCTACTC
GGGCCTCCGGGTTCCCTGACAGGTTCAGTGGCAGT
GGATCAGGCACAGATTTTACACTGAAAATCAGCAG
AGTGGAGGCTGAGGATGTTGGGGTTTATTACTGCA
TGCAAGCTCTACAAACTCCGCTCAGTTTTGGCCAG
GGGACCAAGCTGGAGATCAAA
VL domain amino acid sequence:
SEQ ID NO: 387
DIVMTQSPLSLPVTPGEPASISCRSSQSLLHSDGY
NYLDWYLQKPGQSPQLLIYLGSTRASGFPDRFSGS
GSGTDFTLKISRVEAEDVGVYYCMQALQTPLSFGQ
GTKLEIK
VL CDR1 amino acid sequence:
SEQ ID NO: 384
QSLLHSDGYNY
VL CDR2 amino acid sequence:
SEQ ID NO: 385
LGS
VL CDR3 amino acid sequence:
SEQ ID NO: 386
MQALQTPLS
Antibody STIM002-B
VH domain nucleotide sequence:
SEQ ID NO: 395
CAGGTTCAACTGGTGCAGTCTGGAGGTGAGGTGAA
GAAGCCTGGGGCCTCAGTGAAGGTCTCCTGCAAGG
CTTCTGGTTACACCTTTACCAGCTATGGTTTCAGC
TGGGTGCGACAGGCCCCTGGACAAGGACTAGAGTG
GATGGGATGGATCAGCGCTTACAATGGTAACACAA
ACTATGCACAGAAGCTCCAGGGCAGAGTCACCATG
ACCACAGACACATCCACGAGCACAGCCTACATGGA
GCTGAGGAGCTTGAGATCTGACGACACGGCCGTGT
ATTACTGTGCGAGATCTACGTATTTCTATGGTTCG
GGGACCCTCTACGGTATGGACGTCTGGGGCCAAGG
GACCACGGTCACCGTCTCCTCA
VH domain amino acid sequence:
SEQ ID NO: 394
QVQLVQSGGEVKKPGASVKVSCKASGYTFTSYGFS
WVRQAPGQGLEWMGWISAYNGNTNYAQKLQGRVTM
TTDTSTSTAYMELRSLRSDDTAVYYCARSTYFYGS
GTLYGMDVWGQGTTVTVSS
VH CDR1 amino acid sequence:
SEQ ID NO: 391
GYTFTSYG
VH CDR2 amino acid sequence:
SEQ ID NO: 392
ISAYNGNT
VH CDR3 amino acid sequence:
SEQ ID NO: 393
ARSTYFYGSGTLYGMDV
VL domain nucleotide sequence:
SEQ ID NO: 402
GATATTGTGATGACTCAGTCTCCACTCTCCCTGCC
CGTCACCCCTGGAGAGCCGGCCTCCATCTCCTGCA
GGTCTAGTCAGAGCCTCCTGCATAGTGATGGATAC
AACTGTTTGGATTGGTACCTGCAGAAGCCAGGGCA
GTCTCCACAGCTCCTGATCTATTTGGGTTCTACTC
GGGCCTCCGGGTTCCCTGACAGGTTCAGTGGCAGT
GGATCAGGCACAGATTTTACACTGAAAATCAGCAG
AGTGGAGGCTGAGGATGTTGGGGTTTATTACTGCA
TGCAAGCTCTACAAACTCCGTGCAGTTTTGGCCAG
GGGACCAAGCTGGAGATCAAA
VL domain amino acid sequence:
SEQ ID NO: 401
DIVMTQSPLSLPVTPGEPASISCRSSQSLLHSDGY
NCLDWYLQKPGQSPQLLIYLGSTRASGFPDRFSGS
GSGTDFTLKISRVEAEDVGVYYCMQALQTPCSFGQ
GTKLEIK
VL CDR1 amino acid sequence:
SEQ ID NO: 398
QSLLHSDGYNC
VL CDR2 amino acid sequence:
SEQ ID NO: 399
LGS
VL CDR3 amino acid sequence:
SEQ ID NO: 400
MQALQTPCS
Antibody STIM003
VH domain nucleotide sequence:
SEQ ID NO: 409
GAGGTGCAGCTGGTGGAGTCTGGGGGAGGTGTGGT
ACGGCCTGGGGGGTCCCTGAGACTCTCCTGTGTAG
CCTCTGGAGTCACCTTTGATGATTATGGCATGAGC
TGGGTCCGCCAAGCTCCAGGGAAGGGGCTGGARTG
GGTCTCTGGTATTAATTGGAATGGTGGCGACACAG
ATTATTCAGACTCTGTGAAGGGCCGATTCACCATC
TCCAGAGACAACGCCAAGAACTCCCTGTATCTACA
AATGAATAGTCTGAGAGCCGAGGACACGGCCTTGT
ATTACTGTGCGAGGGATTTCTATGGTTCGGGGAGT
TATTATCACGTTCCTTTTGACTACTGGGGCCAGGG
AATCCTGGTCACCGTCTCCTCA
Corrected STIM003 VH domain nucleotide
sequence:
SEQ ID NO: 521
GAGGTGCAGCTGGTGGAGTCTGGGGGAGGTGTGGT
ACGGCCTGGGGGGTCCCTGAGACTCTCCTGTGTAG
CCTCTGGAGTCACCTTTGATGATTATGGCATGAGC
TGGGTCCGCCAAGCTCCAGGGAAGGGGCTGGAGTG
GGTCTCTGGTATTAATTGGAATGGTGGCGACACAG
ATTATTCAGACTCTGTGAAGGGCCGATTCACCATC
TCCAGAGACAACGCCAAGAACTCCCTGTATCTACA
AATGAATAGTCTGAGAGCCGAGGACACGGCCTTGT
ATTACTGTGCGAGGGATTTCTATGGTTCGGGGAGT
TATTATCACGTTCCTTTTGACTACTGGGGCCAGGG
AATCCTGGTCACCGTCTCCTCA
VH domain amino acid sequence:
SEQ ID NO: 408
EVQLVESGGGVVRPGGSLRLSCVASGVTFDDYGMS
WVRQAPGKGLEWVSGINWNGGDTDYSDSVKGRFTI
SRDNAKNSLYLQMNSLRAEDTALYYCARDFYGSGS
YYHVPFDYWGQGILVTVSS
VH CDR1 amino acid sequence:
SEQ ID NO: 405
GVTFDDYG
VH CDR2 amino acid sequence:
SEQ ID NO: 406
INWNGGDT
VH CDR3 amino acid sequence:
SEQ ID NO: 407
ARDFYGSGSYYHVPFDY
VL domain nucleotide sequence:
SEQ ID NO: 416
GAAATTGTGTTGACGCAGTCTCCAGGGACCCTGTC
TTTGTCTCCAGGGGAAAGAGCCACCCTCTCCTGCA
GGGCCAGTCAGAGTGTTAGCAGAAGCTACTTAGCC
TGGTACCAGCAGAAACGTGGCCAGGCTCCCAGGCT
CCTCATCTATGGTGCATCCAGCAGGGCCACTGGCA
TCCCAGACAGGTTCAGTGGCGATGGGTCTGGGACA
GACTTCACTCTCTCCATCAGCAGACTGGAGCCTGA
AGATTTTGCAGTGTATTACTGTCACCAGTATGATA
TGTCACCATTCACTTTCGGCCCTGGGACCAAAGTG
GATATCAAA
VL domain amino acid sequence:
SEQ ID NO: 415
EIVLTQSPGTLSLSPGERATLSCRASQSVSRSYLA
WYQQKRGQAPRLLIYGASSRATGIPDRFSGDGSGT
DFTLSISRLEPEDFAVYYCHQYDMSPFTFGPGTKV
DIK
VL CDR1 amino acid sequence:
SEQ ID NO: 412
QSVSRSY
VL CDR2 amino acid sequence:
SEQ ID NO: 413
GAS
VL CDR3 amino acid sequence:
SEQ ID NO: 414
HQYDMSPFT
Antibody STIM004
VH domain nucleotide sequence:
SEQ ID NO: 423
GAGGTGCAGCTGGTGGAGTCTGGGGGAGGTGTGGT
ACGGCCTGGGGGGTCCCTGAGACTCTCCTGTGCAG
CCTCTGGACTCACCTTTGATGATTATGGCATGAGC
TGGGTCCGCCAAGTTCCAGGGAAGGGGCTGGAGTG
GGTCTCTGGTATTAATTGGAATGGTGATAACACAG
ATTATGCAGACTCTGTGAAGGGCCGATTCACCATC
TCCAGAGACAACGCCAAGAACTCCCTGTATCTGCA
AATGAACAGTCTGAGAGCCGAGGACACGGCCTTGT
ATTACTGTGCGAGGGATTACTATGGTTCGGGGAGT
TATTATAACGTTCCTTTTGACTACTGGGGCCAGGG
AACCCTGGTCACCGTCTCCTCA
VH domain amino acid sequence:
SEQ ID NO: 422
EVQLVESGGGVVRPGGSLRLSCAASGLTFDDYGMS
WVRQVPGKGLEWVSGINWNGDNTDYADSVKGRFTI
SRDNAKNSLYLQMNSLRAEDTALYYCARDYYGSGS
YYNVPFDYWGQGTLVTVSS
VH CDR1 amino acid sequence:
SEQ ID NO: 419
GLTFDDYG
VH CDR2 amino acid sequence:
SEQ ID NO: 420
INWNGDNT
VH CDR3 amino acid sequence:
SEQ ID NO: 421
ARDYYGSGSYYNVPFDY
VL domain nucleotide sequence:
SEQ ID NO: 431
GAAATTGTGTTGACGCAGTCTCCAGGCACCCTGTC
TTTGTCTCCAGGGGAAAGAGCCACCCTCTCCTGCA
GGGCCAGTCAGAGTGTTAGCAGCAGCTACTTAGCC
TGGTACCAGCAGAAACCTGGCCAGGCTCCCAGGCT
CCTCATATATGGTGCATCCAGCAGGGCCACTGGCA
TCCCAGACAGGTTCAGTGGCAGTGGGTCTGGGACA
GACTTCACTCTCACCATCAGAAGACTGGAGCCTGA
AGATTTTGCAGTGTATTACTGTCAGCAGTATGGTA
GTTCACCATTCACTTCGGCCCTGGGACCAAAGTGG
ATATCAAA
VL domain amino acid sequence as encoded by
the above VL domain nucleotide sequence.
Corrected VL domain nucleotide sequence:
SEQ ID NO: 430
GAAATTGTGTTGACGCAGTCTCCAGGCACCCTGTC
TTTGTCTCCAGGGGAAAGAGCCACCCTCTCCTGCA
GGGCCAGTCAGAGTGTTAGCAGCAGCTACTTAGCC
TGGTACCAGCAGAAACCTGGCCAGGCTCCCAGGCT
CCTCATATATGGTGCATCCAGCAGGGCCACTGGCA
TCCCAGACAGGTTCAGTGGCAGTGGGTCTGGGACA
GACTTCACTCTCACCATCAGAAGACTGGAGCCTGA
AGATTTTGCAGTGTATTACTGTCAGCAGTATGGTA
GTTCACCATTCTTCGGCCCTGGGACCAAAGTGGAT
ATCAAA
Corrected VL domain amino acid sequence:
SEQ ID NO: 432
EIVLTQSPGTLSLSPGERATLSCRASQSVSSSYLA
WYQQKPGQAPRLLIYGASSRATGIPDRFSGSGSGT
DFTLTIRRLEPEDFAVYYCQQYGSSPFFGPGTKVD
IK
VL CDR1 amino acid sequence:
SEQ ID NO: 426
QSVSSSY
VL CDR2 amino acid sequence:
SEQ ID NO: 427
GAS
VL CDR3 amino acid sequence:
SEQ ID NO: 428
QQYGSSPF
Antibody STIM005
VH domain nucleotide sequence:
SEQ ID NO: 439
CAGGTTCAGTTGGTGCAGTCTGGAGCTGAGGTGAA
GAAGCCTGGGGCCTCAGTGAAGGTCTCCTGCAAGG
CTTCTGGTTACACCTTTAATAGTTATGGTATCATC
TGGGTGCGACAGGCCCCTGGACAAGGGCTTGAGTG
GATGGGATGGATCAGCGTTCACAATGGTAACACAA
ACTGTGCACAGAAGCTCCAGGGTAGAGTCACCATG
ACCACAGACACATCCACGAGCACAGCCTACATGGA
GCTGAGGAGCCTGAGAACTGACGACACGGCCGTGT
ATTACTGTGCGAGAGCGGGTTACGATATTTTGACT
GATTTTTCCGATGCTTTTGATATCTGGGGCCACGG
GACAATGGTCACCGTCTCTTCA
VH domain amino acid sequence:
SEQ ID NO: 438
QVQLVQSGAEVKKPGASVKVSCKASGYTFNSYGII
WVRQAPGQGLEWMGWISVHNGNTNCAQKLQGRVTM
TTDTSTSTAYMELRSLRTDDTAVYYCARAGYDILT
DFSDAFDIWGHGTMVTVSS
VH CDR1 amino acid sequence:
SEQ ID NO: 435
GYTFNSYG
VH CDR2 amino acid sequence:
SEQ ID NO: 436
ISVHNGNT
VH CDR3 amino acid sequence:
SEQ ID NO: 437
ARAGYDILTDFSDAFDI
VL domain nucleotide sequence:
SEQ ID NO: 446
GACATCCAGATGACCCAGTCTCCATCCTCCCTGTC
TGCATCTGTAGGAGACAGAGTCACCATCACTTGCC
GGGCAAGTCAGAACATTAATAACTTTTTAAATTGG
TATCAGCAGAAAGAAGGGAAAGGCCCTAAGCTCCT
GATCTATGCAGCATCCAGTTTGCAAAGAGGGATAC
CATCAACGTTCAGTGGCAGTGGATCTGGGACAGAC
TTCACTCTCACCATCAGCAGTCTGCAACCTGAAGA
TTTTGCAACTTACATCTGTCAACAGAGCTACGGTA
TCCCGTGGGTCGGCCAAGGGACCAAGGTGGAAATC
AAA
VL domain amino acid sequence:
SEQ ID NO: 445
DIQMTQSPSSLSASVGDRVTITCRASQNINNFLNW
YQQKEGKGPKLLIYAASSLQRGIPSTFSGSGSGTD
FTLTISSLQPEDFATYICQQSYGIPWVGQGTKVEI
K
VL CDR1 amino acid sequence:
SEQ ID NO: 442
QNINNF
VL CDR2 amino acid sequence:
SEQ ID NO: 443
AAS
VL CDR3 amino acid sequence:
SEQ ID NO: 444
QQSYGIPW
Antibody STIM006
VH domain nucleotide sequence:
SEQ ID NO: 453
CAGGTGCAGCTGGTGGAGTCTGGGGGAGGCTTGGT
CAAGCCTGGAGGGTCCCTGAGACTCTCCTGTGCAG
CCTCTGGATTCACCTTCAGTGACTACTTCATGAGC
TGGATCCGCCAGGCGCCAGGGAAGGGGCTGGAGTG
GATTTCATACATTAGTTCTAGTGGTAGTACCATAT
ACTACGCAGACTCTGTGAGGGGCCGATTCACCATC
TCCAGGGACAACGCCAAGTACTCACTGTATCTGCA
AATGAACAGCCTGAGATCCGAGGACACGGCCGTGT
ATTACTGTGCGAGAGATCACTACGATGGTTCGGGG
ATTTATCCCCTCTACTACTATTACGGTTTGGACGT
CTGGGGCCAGGGGACCACGGTCACCGTCTCCTCA
VH domain amino acid sequence:
SEQ ID NO: 454
QVQLVESGGGLVKPGGSLRLSCAASGFTFSDYFMS
WIRQAPGKGLEWISYISSSGSTIYYADSVRGRFTI
SRDNAKYSLYLQMNSLRSEDTAVYYCARDHYDGSG
IYPLYYYYGLDVWGQGTTVTVSS
VH CDR1 amino acid sequence:
SEQ ID NO: 449
GFTFSDYF
VH CDR2 amino acid sequence:
SEQ ID NO: 450
ISSSGSTI
VH CDR3 amino acid sequence:
SEQ ID NO: 451
ARDHYDGSGIYPLYYYYGLDV
VL domain nucleotide sequence:
SEQ ID NO: 460
ATTGTGATGACTCAGTCTCCACTCTCCCTACCCGT
CACCCCTGGAGAGCCGGCCTCCATCTCCTGCAGGT
CTAGTCAGAGCCTCCTGCATAGTAATGGATACAAC
TATTTGGATTATTACCTGCAGAAGCCAGGGCAGTC
TCCACAGCTCCTGATCTATTTGGGTTCTTATCGGG
CCTCCGGGGTCCCTGACAGGTTCAGTGGCAGTGGA
TCAGGCACAGATTTTACACTGAAAATCAGCAGAGT
GGAGGCTGAGGATGTTGGGGTTTATTACTGCATGC
AAGCTCTACAAACTCCTCGCAGTTTTGGCCAGGGG
ACCACGCTGGAGATCAAA
VL domain amino acid sequence:
SEQ ID NO: 459
IVMTQSPLSLPVTPGEPASISCRSSQSLLHSNGYN
YLDYYLQKPGQSPQLLIYLGSYRASGVPDRFSGSG
SGTDFTLKISRVEAEDVGVYYCMQALQTPRSFGQG
TTLEIK
VL CDR1 amino acid sequence:
SEQ ID NO: 456
QSLLHSNGYNY
VL CDR2 amino acid sequence:
SEQ ID NO: 457
LGS
VL CDR3 amino acid sequence:
SEQ ID NO: 458
MQALQTPRS
Antibody STIM007
VH domain nucleotide sequence:
SEQ ID NO: 467
CAGATCACCTTGAAGGAGTCTGGTCCTACGCTGGT
GAAACCCACACAGACCCTCACGCTGACCTGCACCT
TCTCTGGGTTCTCACTCAGCACTACTGGAGTGGGT
GTGGGCTGGATCCGTCAGCCCCCAGGAAAGGCCCT
GGAGTGGCTTGCAGTCATTTATTGGGATGATGATA
AGCGCTACAGCCCATCTCTGAAGAGCAGACTCACC
ATCACCAAGGACACCTCCAAAAACCAGGTGGTCCT
TACAATGACCAACATGGACCCTGTGGACACAGCCA
CATATTTCTGTACACACGGATATGGTTCGGCGAGT
TATTACCACTACGGTATGGACGTCTGGGGCCAAGG
GACCACGGTCACCGTCTCCTCA
VH domain amino acid sequence:
SEQ ID NO: 466
QITLKESGPTLVKPTQTLTLTCTFSGFSLSTTGVG
VGWIRQPPGKALEWLAVIYWDDDKRYSPSLKSRLT
ITKDTSKNQVVLTMTNMDPVDTATYFCTHGYGSAS
YYHYGMDVWGQGTTVTVSS
VH CDR1 amino acid sequence:
SEQ ID NO: 463
GFSLSTTGVG
VH CDR2 amino acid sequence:
SEQ ID NO: 464
IYWDDDK
VH CDR3 amino acid sequence:
SEQ ID NO: 465
THGYGSASYYHYGMDV
VL domain nucleotide sequence:
SEQ ID NO: 474
GAAATTGTATTGACACAGTCTCCAGCCACCCTGTC
TTTGTCTCCAGGGGAAAGAGCCACCCTCTCCTGCA
GGGCCAGTCAGAGTGTTACCAACTACTTAGCCTGG
CACCAACAGAAACCTGGCCAGGCTCCCAGGCTCCT
CATCTATGATGCATCCAACAGGGCCACTGGCATCC
CAGCCAGGTTCAGTGGCAGTGGGTCTGGGACAGAC
TTCACTCTCACCATCAGCAGCCTAGAGCCTGAAGA
TTTTGCAGTTTATTACTGTCAGCACCGTAGCAACT
GGCCTCTCACTTTCGGCGGAGGGACCAAGGTGGAG
ATCAAAC
VL domain amino acid sequence:
SEQ ID NO: 473
EIVLTQSPATLSLSPGERATLSCRASQSVTNYLAW
HQQKPGQAPRLLIYDASNRATGIPARFSGSGSGTD
FTLTISSLEPEDFAVYYCQHRSNWPLTFGGGTKVE
IK
VL CDR1 amino acid sequence:
SEQ ID NO: 470
QSVTNY
VL CDR2 amino acid sequence:
SEQ ID NO: 471
DAS
VL CDR3 amino acid sequence:
SEQ ID NO: 472
QHRSNWPLT
Antibody STIM008
VH domain nucleotide sequence:
SEQ ID NO: 481
CAGATCACCTTGAAGGAGTCTGGTCCTACGCTGGT
GAAACCCACACAGACCCTCACGCTGACCTGCACCT
TCTCTGGGTTCTCACTCAGCACTAGTGGAGTGGGT
GTGGGCTGGATCCGTCAGCCCCCAGGAAAGGCCCT
GGAGTGGCTTGCAGTCATTTATTGGGATGATGATA
AGCGCTACAGCCCATCTCTGAAGAGCAGGCTCACC
ATCACCAAGGACACCTCCAAAAACCAGGTGGTCCT
TACAATGACCAACATGGACCCTGTGGACACAGCCA
CATATTTCTGTACACACGGATATGGTTCGGCGAGT
TATTACCACTACGGTATGGACGTCTGGGGCCAAGG
GACCACGGTCACCGTCTCCTCA
VH domain amino acid sequence:
SEQ ID NO: 480
QITLKESGPTLVKPTQTLTLTCTFSGFSLSTSGVG
VGWIRQPPGKALEWLAVIYWDDDKRYSPSLKSRLT
ITKDTSKNQVVLTMTNMDPVDTATYFCTHGYGSAS
YYHYGMDVWGQGTTVTVSS
VH CDR1 amino acid sequence:
SEQ ID NO: 477
GFSLSTSGVG
VH CDR2 amino acid sequence:
SEQ ID NO: 478
IYWDDDK
VH CDR3 amino acid sequence:
SEQ ID NO: 479
THGYGSASYYHYGMDV
VL domain nucleotide sequence:
SEQ ID NO: 488
GAAATTGTGTTGACACAGTCTCCAGCCACCCTGTC
TTTGTCTCCAGGGGAAAGAGCCACCCTCTCCTGCA
GGGCCAGTCAGAGTGTTACCAACTACTTAGCCTGG
CACCAACAGAAACCTGGCCAGGCTCCCAGGCTCCT
CATCTATGATGCATCCAACAGGGCCACTGGCATCC
CAGCCAGGTTCAGTGGCAGTGGGTCTGGGACAGAC
TTCACTCTCACCATCAGCAGCCTAGAGCCTGAAGA
TTTTGCAGTTTATTACTGTCAGCAGCGTAGCAACT
GGCCTCTCACTTTCGGCGGAGGGACCAAGGTGGAG
ATCAAA
VL domain amino acid sequence:
SEQ ID NO: 489
EIVLTQSPATLSLSPGERATLSCRASQSVTNYLAW
HQQKPGQAPRLLIYDASNRATGIPARFSGSGSGTD
FTLTISSLEPEDFAVYYCQQRSNWPLTFGGGTKVE
IK
VL CDR1 amino acid sequence:
SEQ ID NO: 484
QSVTNY
VL CDR2 amino acid sequence:
SEQ ID NO: 485
DAS
VL CDR3 amino acid sequence:
SEQ ID NO: 486
QQRSNWPLT
Antibody STIM009
VH domain nucleotide sequence:
SEQ ID NO: 495
CAGGTGCAGCTGGTGGAGTCTGGGGGAGGCTTGGT
CAAGCCTGGAGGGTCCCTGAGACTCTCCTGTGCAG
CCTCTGGATTCACCTTCAGTGACTACTACATGAGC
TGGATCCGCCAGGCTCCAGGGAAGGGGCTGGAGTG
GGTTTCATACATTAGTAGTAGTGGTAGTACCATAT
ACTACGCAGACTCTGTGAAGGGCCGATTCACCATC
TCCAGGGACAACGCCAAGAACTCACTGTATCTGCA
AATTAACAGCCTGAGAGCCGAGGACACGGCCGTGT
ATTACTGTGCGAGAGATTTTTACGATATTTTGACT
GATAGTCCGTACTTCTACTACGGTGTGGACGTCTG
GGGCCAAGGGACCACGGTCACCGTCTCCTCA
VH domain amino acid sequence:
SEQ ID NO: 494
QVQLVESGGGLVKPGGSLRLSCAASGFTFSDYYMS
WIRQAPGKGLEWVSYISSSGSTIYYADSVKGRFTI
SRDNAKNSLYLQINSLRAEDTAVYYCARDFYDILT
DSPYFYYGVDVWGQGTTVTVSS
VH CDR1 amino acid sequence:
SEQ ID NO: 491
GFTFSDYY
VH CDR2 amino acid sequence:
SEQ ID NO: 492
ISSSGSTI
VH CDR3 amino acid sequence:
SEQ ID NO: 493
ARDFYDILTDSPYFYYGVDV
VL domain nucleotide sequence:
SEQ ID NO: 502
GATATTGTGATGACTCAGTCTCCACTCTCCCTGCC
CGTCACCCCTGGAGAGCCGGCCTCCATCTCCTGCA
GGTCTAGTCAGAGCCTCCTGCATAGTAATGGATAC
AACTATTTGGATTGGTACCTGCAGAAGCCAGGGCA
GTCTCCACAGCTCCTGATCTATTTGGGTTCTAATC
GGGCCTCCGGGGTCCCTGACAGGTTCAGTGGCAGT
GGATCAGGCACAGATTTTACACTGAAAATCAGCAG
AGTGGAGGCTGAGGATGTTGGGGTTTATTACTGCA
TGCAAGCTCTACAAACTCCTCGGACGTTCGGCCAA
GGGACCAAGGTGGAAATCAAA
VL domain amino acid sequence:
SEQ ID NO: 501
DIVMTQSPLSLPVTPGEPASISCRSSQSLLHSNGY
NYLDWYLQKPGQSPQLLIYLGSNRASGVPDRFSGS
GSGTDFTLKISRVEAEDVGVYYCMQALQTPRTFGQ
GTKVEIK
VL CDR1 amino acid sequence:
SEQ ID NO: 498
QSLLHSNGYNY
VL CDR2 amino acid sequence:
SEQ ID NO: 499
LGS
VL CDR3 amino acid sequence:
SEQ ID NO: 500
MQALQTPRT

TABLE S1
SEQ ID NOS: 1-342

| SEQ | | | | |
|---|---|---|---|---|
| ID | | | | |
| NO: | Name | Description | | Sequence |
| 1 | Human | NCBI number: | | MRIFAVFIFMTYWHLLNAFTVTVPKDLYVV |
| | PD-L1 | (ECD highlighted in | | EYGSNMTIECKFPVEKQLDLAALIVYWEM |
| | | BOLD, cytoplasmic | | EDKNIIQFVHGEEDLKVQHSSYRQRARLLK |
| | | domain underlined) | | DQLSLGNAALQITDVKLQDAGVYRCMISY |
| | | NP_054862.1 | | GGADYKRITVKVNAPYNKINQRILVVDPVT |
| | | | | SEHELTCQAEGYPKAEVIWTSSDHQVLSGK |
| | | | | TTTTNSKREEKLFNVTSTLRINTTTNEIFYC |
| | | | | TFRRLDPEENHTAELVIPELPLAHPPNERTH |
| | | | | LVILGAILLCLGVALTFIFRLRKGRMMDVKKC |
| | | | | GIQDTNSKKQSDTHLEET |
| 2 | Cyno | NCBI number: | | MGWSCIILFLVATATGVHSMFTVTVPKDLYV |
| | PD-L1 | XP_014973154.1 | | VEYGSNMTIECKFPVEKQLDLTSLIVYWE |
| | | (ECD highlighted in | | MEDKNIIQFVHGEEDLKVQHSNYRQRAQL |
| | | BOLD) | | LKDQLSLGNAALRITDVKLQDAGVYRCMI |
| | | | | SYGGADYKRITVKVNAPYNKINQRILVVDP |
| | | | | VTSEHELTCQAEGYPKAEVIWTSSDHQVLS |
| | | | | GKTTTTNSKREEKLLNVTSTLRINTTANEIF |
| | | | | YCIFRRLDPEENHTAELVIPELPLALPPNER |
| | | | | T |
| 3 | Human | Human PD-L1 ECD | | MRIFAVFIFMTYWHLLNAFTVTVPKDLYVVE |
| | PD-L1 | with C-terminal His | | YGSNMTIECKFPVEKQLDLAALIVYWEMEDK |
| | His | tag | | NIIQFVHGEEDLKVQHSSYRQRARLLKDQLSL |
| | | | | GNAALQITDVKLQDAGVYRCMISYGGADYK |
| | | | | RITVKVNAPYNKINQRILVVDPVTSEHELTCQ |
| | | | | AEGYPKAEVIWTSSDHQVLSGKTTTTNSKRE |
| | | | | EKLFNVTSTLRINTTTNEIFYCTFRRLDPEENH |
| | | | | TAELVIPELPLAHPPNERTHHHHHH |
| 4 | Human | Human PD-L1 ECD | | MRIFAVFIFMTYWHLLNAFTVTVPKDLYVVE |
| | PD-L1 | with C-term Fc | | YGSNMTIECKFPVEKQLDLAALIVYWEMEDK |
| | Fc | fusion (in bold) | | NIIQFVHGEEDLKVQHSSYRQRARLLKDQLSL |
| | | | | GNAALQITDVKLQDAGVYRCMISYGGADYK |
| | | | | RITVKVNAPYNKINQRILVVDPVTSEHELTCQ |
| | | | | AEGYPKAEVIWTSSDHQVLSGKTTTTNSKRE |
| | | | | EKLFNVTSTLRINTTTNEIFYCTFRRLDPEENH |
| | | | | TAELVIPELPLAHPPNERTIEGREPKSCDKTH |
| | | | | TCPPCPAPELLGGPSVFLFPPKPKDTLMISR |
| | | | | TPEVTCVVVDVSHEDPEVKFNWYVDGVEV |
| | | | | HNAKTKPREEQYNSTYRVVSVLTVLHQDW |
| | | | | LNGKEYKCKVSNKALPAPIEKTISKAKGQP |
| | | | | REPQVYTLPPSRDELTKNQVSLTCLVKGFY |
| | | | | PSDIAVEWESNGQPENNYKTTPPVLDSDGS |
| | | | | FFLYSKLTVDKSRWQQGNVFSCSVMHEAL |
| | | | | HNHYTQKSLSLSPGK |
| 5 | Cyno | Cynomolgus PD-L1 | | MGWSCIILFLVATATGVHSMFTVTVPKDLYV |
| | PD-L1 | ECD with N-term | | VEYGSNMTIECKFPVEKQLDLTSLIVYWEME |
| | FLAG | FLAG tag | | DKNIIQFVHGEEDLKVQHSNYRQRAQLLKDQ |
| | | | | LSLGNAALRITDVKLQDAGVYRCMISYGGAD |
| | | | | YKRITVKVNAPYNKINQRILVVDPVTSEHELT |
| | | | | CQAEGYPKAEVIWTSSDHQVLSGKTTTTNSK |
| | | | | REEKLLNVTSTLRINTTANEIFYCIFRRLDPEE |
| | | | | NHTAELVIPELPLALPPNERTDYKDDDDK |
| 6 | Human | Human PD-1 full | | MGWSCIILFLVATATGVHSLDSPDRPWNPPTF |
| | PD-1 Fc | length sequence | | SPALLVVTEGDNATFTCSFSNTSESFVLNWYR |
| | | derived from cDNA | | MSPSNQTDKLAAFPEDRSQPGQDCRFRVTQL |
| | | as human Fc fusion | | PNGRDFHMSVVRARRNDSGTYLCGAISLAPK |
| | | | | AQIKESLRAELRVTERRAEVPTAHPSPSPRPA |
| | | | | GQKLENLYFQGIEGRMDEPKSCDKTHTCP |
| | | | | PCPAPELLGGPSVFLFPPKPKDTLMISRTPE |
| | | | | VTCVVVDVSHEDPEVKFNWYVDGVEVHNA |
| | | | | KTKPREEQYNSTYRVVSVLTVLHQDWLNG |
| | | | | KEYKCKVSNKALPAPIEKTISKAKGQPREP |
| | | | | QVYTLPPSRDELTKNQVSLTCLVKGFYPSD |
| | | | | IAVEWESNGQPENNYKTTPPVLDSDGSFFL |
| | | | | YSKLTVDKSRWQQGNVFSCSVMHEALHN |
| | | | | HYTQKSLSLSP |
| 7 | 84G09- | Amino acid | | GFTFDDYA |
| | CDRH1 | sequence of CDRH1 | | |
| | (IMGT) | of 84G09 using | | |
| | | IMGT | | |
| 8 | 84G09- | Amino acid | | ISWKSNII |
| | CDRH2 | sequence of CDRH2 | | |
| | (IMGT) | of 84G09 using | | |
| | | IMGT | | |
| 9 | 84G09- | Amino acid | | ARDITGSGSYGWFDP |
| | CDRH3 | sequence of CDRH3 | | |
| | (IMGT) | of 84G09 using | | |
| | | IMGT | | |
| 10 | 84G09- | Amino acid | | DYAMH |
| | CDRH1 | sequence of CDRH1 | | |
| | (Kabat) | of 84G09 using | | |
| | | Kabat | | |
| 11 | 84G09- | Amino acid | | GISWKSNIIGYADSVKG |
| | CDRH2 | sequence of CDRH2 | | |
| | (Kabat) | of 84G09 using | | |
| | | Kabat | | |
| 12 | 84G09- | Amino acid | | DITGSGSYGWFDP |
| | CDRH3 | sequence of CDRH3 | | |
| | (Kabat) | of 84G09 using | | |
| | | Kabat | | |
| 13 | 84G09- | Amino acid | | EVQLVESGGGLVQPGRSLRLSCAASGFTFDD |
| | Heavy | sequence of V_{H} of | | YAMHWVRQTPGKGLEWVSGISWKSNIIGYA |
| | chain | 84G09(mutations | | DSVKGRFTISRDNAKNSLYLQMNSLRAEDTA |
| | variable | from germline are | | LYYCARDITGSGSYGWFDPWGQGTLVTVSS |
| | region | shown in bold | | |
| | | letters) | | |
| 14 | 84G09- | Nucleic acid | | CAaGAAAAAGCTTGCCGCCACCATGGAGTT |
| | Heavy | sequence of V_{H} of | | TGGGCTGAGCTGGATTTTCCTTTTGGCTATT |
| | chain | 84G09 | | TTAAAAGGTGTCCAGTGTGAAGTACAATTG |
| | variable | | | GTGGAGTCCGGGGGAGGCTTGGTACAGCCT |
| | region | | | GGCAGGTCCCTGAGACTCTCCTGTGCAGCC |
| | | | | TCTGGATTCACCTTTGATGATTATGCCATGC |
| | | | | ACTGGGTCCGACAAACTCCAGGGAAGGGCC |
| | | | | TGGAGTGGGTCTCAGGTATAAGTTGGAAGA |
| | | | | GTAATATCATAGGCTATGCGGACTCTGTGA |
| | | | | AGGGCCGATTCACCATCTCCAGAGACAACG |
| | | | | CCAAGAACTCCCTGTATCTGCAAATGAACA |
| | | | | GTCTGAGAGCTGAGGACACGGCCTTGTATT |
| | | | | ATTGTGCAAGAGATATAACGGGTTCGGGGA |
| | | | | GTTATGGCTGGTTCGACCCCTGGGGCCAGG |
| | | | | GAACCCTGGTCACCGTCTCCTCAGCCAAAA |
| | | | | CGACACCCCCATCTGTCTATCCACTGGCCCC |
| | | | | TGAATCTGCTAAAACTCAGCCTCCG |
| 15 | 84G09- | Amino acid | | EVQLVESGGGLVQPGRSLRLSCAASGFTFDD |
| | full | sequence of 84G09 | | YAMHWVRQTPGKGLEWVSGISWKSNIIGYA |
| | heavy | heavy chain | | DSVKGRFTISRDNAKNSLYLQMNSLRAEDTA |
| | chain | (mutations from | | LYYCARDITGSGSYGWFDPWGQGTLVTVSSA |
| | sequence | germline are shown | | STKGPSVFPLAPCSRSTSESTAALGCLVKDYF |
| | | in bold letters) | | PEPVTVSWNSGALTSGVHTFPAVLQSSGLYSL |
| | | | | SSVVTVPSSSLGTKTYTCNVDHKPSNTKVDK |
| | | | | RVESKYGPPCPPCPAPEFEGGPSVFLFPPKPK |
| | | | | DTLMISRTPEVTCVVVDVSQEDPEVQFNWYVD |
| | | | | GVEVHNAKTKPREEQFNSTYRVVSVLTVLHQ |
| | | | | DWLNGKEYKCKVSNKGLPSSIEKTISKAKGQ |
| | | | | PREPQVYTLPPSQEEMTKNQVSLTCLVKGFYP |
| | | | | SDIAVEWESNGQPENNYKTTPPVLDSDGSFFL |
| | | | | YSRLTVDKSRWQEGNVFSCSVMHEALHNHY |
| | | | | TQKSLSLSLGK |
| 16 | 84G09- | Nucleic acid | | GAAGTGCAGCTGGTGGAATCTGGCGGCGGA |
| | full | sequence of 84G09 | | CTGGTGCAGCCTGGCAGATCCCTGAGACTG |
| | heavy | heavy chain | | TCTTGTGCCGCCTCCGGCTTCACCTTCGACG |
| | chain | | | ACTACGCTATGCACTGGGTGCGACAGACCC |
| | sequence | | | CTGGCAAGGGCCTGGAATGGGTGTCCGGCA |
| | | | | TCTCCTGGAAGTCCAACATCATCGGCTACG |
| | | | | CCGACTCCGTGAAGGGCCGGTTCACCATCT |
| | | | | CCCGGGACAACGCCAAGAACTCCCTGTACC |
| | | | | TGCAGATGAACAGCCTGCGGGCCGAGGAC |
| | | | | ACCGCCCTGTACTACTGCGCCAGAGACATC |
| | | | | ACCGGCTCCGGCTCCTACGGATGGTTCGAT |
| | | | | CCTTGGGGCCAGGGCACCCTCGTGACCGTG |
| | | | | TCCTCTGCCAGCACCAAGGGCCCCTCTGTG |
| | | | | TTCCCTCTGGCCCCTTCCAGCAAGTCCACCT |
| | | | | CTGGCGGAACAGCCGCTCTGGGCTGCCTCG |
| | | | | TGAAGGACTACTTCCCCGAGCCTGTGACCG |
| | | | | TGTCCTGGAACTCTGGCGCTCTGACCAGCG |
| | | | | GAGTGCACACCTTCCCTGCTGTGCTGCAGT |
| | | | | CCTCCGGCCTGTACTCCCTGTCCTCCGTCGT |
| | | | | GACCGTGCCTTCCAGCTCTCTGGGCACCCA |
| | | | | GACCTACATCTGCAACGTGAACCACAAGCC |
| | | | | CTCCAACACCAAGGTGGACAAGAAGGTGG |
| | | | | AACCCAAGTCCTGCGACAAGACCCACACCT |
| | | | | GTCCCCCTTGTCCTGCCCCTGAACTGCTGGG |
| | | | | CGGACCTTCCGTGTTCCTGTTCCCCCCAAAG |
| | | | | CCCAAGGACACCCTGATGATCTCCCGGACC |
| | | | | CCCGAAGTGACCTGCGTGGTGGTGGATGTG |
| | | | | TCCCACGAGGACCCTGAAGTGAAGTTCAAT |
| | | | | TGGTACGTGGACGGCGTGGAAGTGCACAAC |
| | | | | GCCAAGACCAAGCCTAGAGAGGAACAGTA |
| | | | | CAACTCCACCTACCGGGTGGTGTCCGTGCT |
| | | | | GACCGTGCTGCACCAGGATTGGCTGAACGG |
| | | | | CAAAGAGTACAAGTGCAAGGTGTCCAACA |
| | | | | AGGCCCTGCCTGCCCCCATCGAAAAGACCA |
| | | | | TCTCCAAGGCCAAGGGCCAGCCCCGGGAAC |
| | | | | CCCAGGTGTACACACTGCCCCCTAGCAGGG |
| | | | | ACGAGCTGACCAAGAACCAGGTGTCCCTGA |
| | | | | CCTGTCTCGTGAAAGGCTTCTACCCCTCCGA |
| | | | | TATCGCCGTGGAATGGGAGTCCAACGGCCA |
| | | | | GCCTGAGAACAACTACAAGACCACCCCCCC |
| | | | | TGTGCTGGACTCCGACGGCTCATTCTTCCTG |
| | | | | TACAGCAAGCTGACAGTGGACAAGTCCCGG |
| | | | | TGGCAGCAGGGCAACGTGTTCTCCTGCTCC |
| | | | | GTGATGCACGAGGCCCTGCACAACCACTAC |
| | | | | ACCCAGAAGTCCCTGTCCCTGAGCCCCGGC |
| | | | | AAG |
| 17 | 84G09- | Amino acid | | QSISSY |
| | CDRL1 | sequence of CDRL1 | | |
| | (IMGT) | of 84G09 using | | |
| | | IMGT | | |
| 18 | 84G09- | Amino acid | | VAS |
| | CDRL2 | sequence of CDRL2 | | |
| | (IMGT) | of 84G09 using | | |
| | | IMGT | | |
| 19 | 84G09- | Amino acid | | QQSYSNPIT |
| | CDRL3 | sequence of CDRL3 | | |
| | (IMGT) | of 84G09 using | | |
| | | IMGT | | |
| 20 | 84G09- | Amino acid | | RASQSISSYLN |
| | CDRL1 | sequence of CDRL1 | | |
| | (Kabat) | of 84G09 using | | |
| | | Kabat | | |
| 21 | 84G09- | Amino acid | | VASSLQS |
| | CDRL2 | sequence of CDRL2 | | |
| | (Kabat) | of 84G09 using | | |
| | | Kabat | | |
| 22 | 84G09- | Amino acid | | QQSYSNPIT |
| | CDRL3 | sequence of CDRL3 | | |
| | (Kabat) | of 84G09 using | | |
| | | Kabat | | |
| 23 | 84G09- | Amino acid | | DIQMTQSPSSLSASVGDRVTITCRASQSISSYL |
| | Light | sequence of V_{L} of | | NWYQQKPGKAPKPLIYVASSLQSGVPSSFSGS |
| | chain | 84G09 | | GSGTDFTLTISSLQPEDFATYYCQQSYSNPITF |
| | variable | | | GQGTRLEIK |
| | region | | | |
| 24 | 84G09- | Nucleic acid | | GACATCCAGATGACCCAGTCTCCATCCTCC |
| | Light | sequence of V_{L} of | | CTGTCTGCATCTGTAGGAGACAGAGTCACC |
| | chain | 84G09 | | ATCACTTGCCGGGCAAGTCAGAGCATTAGC |
| | variable | | | AGCTATTTAAATTGGTATCAGCAGAAACCA |
| | region | | | GGGAAAGCCCCTAAGCCCCTGATCTATGTT |
| | | | | GCATCCAGTTTGCAAAGTGGGGTCCCATCA |
| | | | | AGTTTCAGTGGCAGTGGATCTGGGACAGAT |
| | | | | TTCACTCTCACCATCAGCAGTCTGCAACCTG |
| | | | | AAGATTTTGCAACTTACTACTGTCAACAGA |
| | | | | GTTACAGTAATCCGATCACCTTCGGCCAAG |
| | | | | GGACACGACTGGAGATCAAA |
| 25 | 84G09- | Amino acid | | DIQMTQSPSSLSASVGDRVTITCRASQSISSYL |
| | full light | sequence of 84G09 | | NWYQQKPGKAPKPLIYVASSLQSGVPSSFSGS |
| | chain | light chain | | GSGTDFTLTISSLQPEDFATYYCQQSYSNPITF |
| | sequence | | | GQGTRLEIKRTVAAPSVFIFPPSDEQLKSGTAS |
| | | | | VVCLLNNFYPREAKVQWKVDNALQSGNSQE |
| | | | | SVTEQDSKDSTYSLSSTLTLSKADYEKHKVY |
| | | | | ACEVTHQGLSSPVTKSFNRGEC |
| 26 | 84G09- | Nucleic acid | | GACATCCAGATGACCCAGTCTCCATCCTCC |
| | full light | sequence of 84G09 | | CTGTCTGCATCTGTAGGAGACAGAGTCACC |
| | chain | light chain | | ATCACTTGCCGGGCAAGTCAGAGCATTAGC |
| | sequence | | | AGCTATTTAAATTGGTATCAGCAGAAACCA |
| | | | | GGGAAAGCCCCTAAGCCCCTGATCTATGTT |
| | | | | GCATCCAGTTTGCAAAGTGGGGTCCCATCA |
| | | | | AGTTTCAGTGGCAGTGGATCTGGGACAGAT |
| | | | | TTCACTCTCACCATCAGCAGTCTGCAACCTG |
| | | | | AAGATTTTGCAACTTACTACTGTCAACAGA |
| | | | | GTTACAGTAATCCGATCACCTTCGGCCAAG |
| | | | | GGACACGACTGGAGATCAAACGTACGGTG |
| | | | | GCCGCTCCCTCCGTGTTCATCTTCCCACCTT |
| | | | | CCGACGAGCAGCTGAAGTCCGGCACCGCTT |
| | | | | CTGTCGTGTGCCTGCTGAACAACTTCTACCC |
| | | | | CCGCGAGGCCAAGGTGCAGTGGAAGGTGG |
| | | | | ACAACGCCCTGCAGTCCGGCAACTCCCAGG |
| | | | | AATCCGTGACCGAGCAGGACTCCAAGGACA |
| | | | | GCACCTACTCCCTGTCCTCCACCCTGACCCT |
| | | | | GTCCAAGGCCGACTACGAGAAGCACAAGG |
| | | | | TGTACGCCTGCGAAGTGACCCACCAGGGCC |
| | | | | TGTCTAGCCCCGTGACCAAGTCTTTCAACC |
| | | | | GGGGCGAGTGT |
| 27 | 1D05- | Amino acid | | GFTFDDYA |
| | CDRH1 | sequence of CDRH1 | | |
| | (IMGT) | of 1D05 using | | |
| | | IMGT | | |
| 28 | 1D05- | Amino acid | | ISWIRTGI |
| | CDRH2 | sequence of CDRH2 | | |
| | (IMGT) | of 1D05 using | | |
| | | IMGT | | |
| 29 | 1D05- | Amino acid | | AKDMKGSGTYGGWFDT |
| | CDRH3 | sequence of CDRH3 | | |
| | (IMGT) | of 1D05 using | | |
| | | IMGT | | |
| 30 | 1D05- | Amino acid | | DYAMH |
| | CDRH1 | sequence of CDRH1 | | |
| | (Kabat) | of 1D05 using Kabat | | |
| 31 | 1D05- | Amino acid | | GISWIRTGIGYADSVKG |
| | CDRH2 | sequence of CDRH2 | | |
| | (Kabat) | of 1D05 using Kabat | | |
| 32 | 1D05- | Amino acid | | DMKGSGTYGGWFDT |
| | CDRH3 | sequence of CDRH3 | | |
| | (Kabat) | of 1D05 using Kabat | | |
| 33 | 1D05- | Amino acid | | EVQLVESGGGLVQPGRSLRLSCAASGFTFDD |
| | Heavy | sequence of V_{H} of | | YAMHWVRQVPGKGLEWVSGISWIRTGIGYA |
| | chain | 1D05 (mutations | | DSVKGRFTIFRDNAKNSLYLQMNSLRAEDTA |
| | variable | from germline are | | LYYCAKDMKGSGTYGGWFDTWGQGTLVTV |
| | region | shown in bold | | SS |
| | | letters) | | |
| 34 | 1D05- | Nucleic acid | | AAGCTTGCCGCCACCATGGAGTTTGGGCTG |
| | Heavy | sequence of V_{H} of | | AGCTGGATTTTCCTTTTGGCTATTTTAAAAG |
| | chain | 1D05 | | GTGTCCAGTGTGAAGTGCAGCTGGTGGAGT |
| | variable | | | CTGGGGGAGGCTTGGTGCAGCCTGGCAGGT |
| | region | | | CCCTGAGACTCTCCTGTGCAGCCTCTGGATT |
| | | | | CACCTTTGATGATTATGCCATGCACTGGGTC |
| | | | | CGGCAAGTTCCAGGGAAGGGCCTGGAATG |
| | | | | GGTCTCAGGCATTAGTTGGATTCGTACTGG |
| | | | | CATAGGCTATGCGGACTCTGTGAAGGGCCG |
| | | | | ATTCACCATTTTCAGAGACAACGCCAAGAA |
| | | | | TTCCCTGTATCTGCAAATGAACAGTCTGAG |
| | | | | AGCTGAGGACACGGCCTTGTATTACTGTGC |
| | | | | AAAAGATATGAAGGGTTCGGGGACTTATGG |
| | | | | GGGGTGGTTCGACACCTGGGGCCAGGGAAC |
| | | | | CCTGGTCACCGTCTCCTCAGCCAAAACAAC |
| | | | | AGCCCCATCGGTCTATCCACTGGCCCCTGC |
| 35 | 1D05- | Amino acid | | EVQLVESGGGLVQPGRSLRLSCAASGFTFDD |
| | full | sequence of 1D05 | | YAMHWVRQVPGKGLEWVSGISWIRTGIGYA |
| | heavy | heavy chain | | DSVKGRFTIFRDNAKNSLYLQMNSLRAEDTA |
| | chain | | | LYYCAKDMKGSGTYGGWFDTWGQGTLVTV |
| | sequence | | | SSASTKGPSVFPLAPCSRSTSESTAALGCLVK |
| | | | | DYFPEPVTVSWNSGALTSGVHTFPAVLQSSG |
| | | | | LYSLSSVVTVPSSSLGTKTYTCNVDHKPSNTK |
| | | | | VDKRVESKYGPPCPPCPAPEFEGGPSVFLFPP |
| | | | | KPKDTLMISRTPEVTCVVVDVSQEDPEVQFN |
| | | | | WYVDGVEVHNAKTKPREEQFNSTYRVVSVL |
| | | | | TVLHQDWLNGKEYKCKVSNKGLPSSIEKTIS |
| | | | | KAKGQPREPQVYTLPPSQEEMTKNQVSLTCL |
| | | | | VKGFYPSDIAVEWESNGQPENNYKTTPPVLD |
| | | | | SDGSFFLYSRLTVDKSRWQEGNVFSCSVMHE |
| | | | | ALHNHYTQKSLSLSLGK |
| 36 | 1D05- | Nucleic acid | | GAAGTGCAGCTGGTGGAATCTGGCGGCGGA |
| | full | sequence of 1D05 | | CTGGTGCAGCCTGGCAGATCCCTGAGACTG |
| | heavy | heavy chain | | TCTTGTGCCGCCTCCGGCTTCACCTTCGACG |
| | chain | | | ACTACGCTATGCACTGGGTGCGACAGGTGC |
| | sequence | | | CAGGCAAGGGCCTGGAATGGGTGTCCGGCA |
| | | | | TCTCTTGGATCCGGACCGGCATCGGCTACG |
| | | | | CCGACTCTGTGAAGGGCCGGTTCACCATCT |
| | | | | TCCGGGACAACGCCAAGAACTCCCTGTACC |
| | | | | TGCAGATGAACAGCCTGCGGGCCGAGGAC |
| | | | | ACCGCCCTGTACTACTGCGCCAAGGACATG |
| | | | | AAGGGCTCCGGCACCTACGGCGGATGGTTC |
| | | | | GATACTTGGGGCCAGGGCACCCTCGTGACC |
| | | | | GTGTCCTCTGCCAGCACCAAGGGCCCCTCT |
| | | | | GTGTTCCCTCTGGCCCCTTCCAGCAAGTCCA |
| | | | | CCTCTGGCGGAACAGCCGCTCTGGGCTGCC |
| | | | | TCGTGAAGGACTACTTCCCCGAGCCTGTGA |
| | | | | CCGTGTCCTGGAACTCTGGCGCTCTGACCA |
| | | | | GCGGAGTGCACACCTTCCCTGCTGTGCTGC |
| | | | | AGTCCTCCGGCCTGTACTCCCTGTCCTCCGT |
| | | | | CGTGACCGTGCCTTCCAGCTCTCTGGGCAC |
| | | | | CCAGACCTACATCTGCAACGTGAACCACAA |
| | | | | GCCCTCCAACACCAAGGTGGACAAGAAGGT |
| | | | | GGAACCCAAGTCCTGCGACAAGACCCACAC |
| | | | | CTGTCCCCCTTGTCCTGCCCCTGAACTGCTG |
| | | | | GGCGGACCTTCCGTGTTCCTGTTCCCCCCAA |
| | | | | AGCCCAAGGACACCCTGATGATCTCCCGGA |
| | | | | CCCCCGAAGTGACCTGCGTGGTGGTGGATG |
| | | | | TGTCCCACGAGGACCCTGAAGTGAAGTTCA |
| | | | | ATTGGTACGTGGACGGCGTGGAAGTGCACA |
| | | | | ACGCCAAGACCAAGCCTAGAGAGGAACAG |
| | | | | TACAACTCCACCTACCGGGTGGTGTCCGTG |
| | | | | CTGACCGTGCTGCACCAGGATTGGCTGAAC |
| | | | | GGCAAAGAGTACAAGTGCAAGGTGTCCAA |
| | | | | CAAGGCCCTGCCTGCCCCCATCGAAAAGAC |
| | | | | CATCTCCAAGGCCAAGGGCCAGCCCCGGGA |
| | | | | ACCCCAGGTGTACACACTGCCCCCTAGCAG |
| | | | | GGACGAGCTGACCAAGAACCAGGTGTCCCT |
| | | | | GACCTGTCTCGTGAAAGGCTTCTACCCCTCC |
| | | | | GATATCGCCGTGGAATGGGAGTCCAACGGC |
| | | | | CAGCCTGAGAACAACTACAAGACCACCCCC |
| | | | | CCTGTGCTGGACTCCGACGGCTCATTCTTCC |
| | | | | TGTACAGCAAGCTGACAGTGGACAAGTCCC |
| | | | | GGTGGCAGCAGGGCAACGTGTTCTCCTGCT |
| | | | | CCGTGATGCACGAGGCCCTGCACAACCACT |
| | | | | ACACCCAGAAGTCCCTGTCCCTGAGCCCCG |
| | | | | GCAAG |
| 37 | 1D05- | Amino acid | | QSISSY |
| | CDRL1 | sequence of CDRL1 | | |
| | (IMGT) | of 1D05 using | | |
| | | IMGT | | |
| 38 | 1D05- | Amino acid | | VAS |
| | CDRL2 | sequence of CDRL2 | | |
| | (IMGT) | of 1D05 using | | |
| | | IMGT | | |
| 39 | 1D05- | Amino acid | | QQSYSTPIT |
| | CDRL3 | sequence of CDRL3 | | |
| | (IMGT) | of 1D05 using | | |
| | | IMGT | | |
| 40 | 1D05- | Amino acid | | RASQSISSYLN |
| | CDRL1 | sequence of CDRL1 | | |
| | (Kabat) | of 1D05 using Kabat | | |
| 41 | 1D05- | Amino acid | | VASSLQS |
| | CDRL2 | sequence of CDRL2 | | |
| | (Kabat) | of 1D05 using Kabat | | |
| 42 | 1D05- | Amino acid | | QQSYSTPIT |
| | CDRL3 | sequence of CDRL3 | | |
| | (Kabat) | of 1D05 using Kabat | | |
| 43 | 1D05- | Amino acid | | DIQMTQSPSSLSASVGDRVTITCRASQSISSYL |
| | Light | sequence of V_{L} of | | NWYQQKPGKAPKLLIYVASSLQSGVPSRFSG |
| | chain | 1D05 (mutations | | SGSGTDFTLTISSLQPEDFATYYCQQSYSTPIT |
| | variable | from germline are | | FGQGTRLEIK |
| | region | shown in bold | | |
| | | letters) | | |
| 44 | 1D05- | Nucleic acid | | AAAGCTTGCCGCCACCATGAGGCTCCCTGC |
| | Light | sequence of V_{L} of | | TCAGCTTCTGGGGCTCCTGCTACTCTGGCTC |
| | chain | 1D05 | | CGAGGTGCCAGATGTGACATCCAGATGACC |
| | variable | | | CAGTCTCCATCCTCCCTGTCTGCATCTGTAG |
| | region | | | GAGACAGAGTCACCATCACTTGCCGGGCAA |
| | | | | GTCAGAGCATTAGCAGCTATTTAAATTGGT |
| | | | | ATCAGCAGAAACCAGGGAAAGCCCCTAAA |
| | | | | CTCCTGATCTATGTTGCATCCAGTTTGCAAA |
| | | | | GTGGGGTCCCATCAAGGTTCAGTGGCAGTG |
| | | | | GATCTGGGACAGATTTCACTCTCACTATCA |
| | | | | GCAGTCTGCAACCTGAAGATTTTGCAACTT |
| | | | | ACTACTGTCAACAGAGTTACAGTACCCCGA |
| | | | | TCACCTTCGGCCAAGGGACACGTCTGGAGA |
| | | | | TCAAACGTACGGATGCTGCACCAACT |
| 45 | 1D05- | Amino acid | | DIQMTQSPSSLSASVGDRVTITCRASQSISSYL |
| | full light | sequence of 1D05 | | NWYQQKPGKAPKLLIYVASSLQSGVPSRFSG |
| | chain | light chain | | SGSGTDFTLTISSLQPEDFATYYCQQSYSTPIT |
| | sequence | | | FGQGTRLEIKRTVAAPSVFIFPPSDEQLKSGTA |
| | | | | SVVCLLNNFYPREAKVQWKVDNALQSGNSQ |
| | | | | ESVTEQDSKDSTYSLSSTLTLSKADYEKHKVY |
| | | | | ACEVTHQGLSSPVTKSFNRGEC |
| 46 | 1D05- | Nucleic acid | | GACATCCAGATGACCCAGTCCCCCTCCAGC |
| | full light | sequence of 1D05 | | CTGTCTGCTTCCGTGGGCGACAGAGTGACC |
| | chain | light chain | | ATCACCTGTCGGGCCTCCCAGTCCATCTCCT |
| | sequence | | | CCTACCTGAACTGGTATCAGCAGAAGCCCG |
| | | | | GCAAGGCCCCCAAGCTGCTGATCTACGTGG |
| | | | | CCAGCTCTCTGCAGTCCGGCGTGCCCTCTA |
| | | | | GATTCTCCGGCTCTGGCTCTGGCACCGACTT |
| | | | | TACCCTGACCATCAGCTCCCTGCAGCCCGA |
| | | | | GGACTTCGCCACCTACTACTGCCAGCAGTC |
| | | | | CTACTCCACCCCTATCACCTTCGGCCAGGG |
| | | | | CACCCGGCTGGAAATCAAACGTACGGTGGC |
| | | | | CGCTCCCTCCGTGTTCATCTTCCCACCTTCC |
| | | | | GACGAGCAGCTGAAGTCCGGCACCGCTTCT |
| | | | | GTCGTGTGCCTGCTGAACAACTTCTACCCCC |
| | | | | GCGAGGCCAAGGTGCAGTGGAAGGTGGAC |
| | | | | AACGCCCTGCAGTCCGGCAACTCCCAGGAA |
| | | | | TCCGTGACCGAGCAGGACTCCAAGGACAGC |
| | | | | ACCTACTCCCTGTCCTCCACCCTGACCCTGT |
| | | | | CCAAGGCCGACTACGAGAAGCACAAGGTG |
| | | | | TACGCCTGCGAAGTGACCCACCAGGGCCTG |
| | | | | TCTAGCCCCGTGACCAAGTCTTTCAACCGG |
| | | | | GGCGAGTGT |
| 47 | Mutated | Amino acid | | EVQLVESGGGLVQPGRSLRLSCAASGFTFDD |
| | 1D05- | sequence of 1D05 | | YAMHWVRQAPGKGLEWVSGISWIRTGIGYA |
| | HC | heavy chain with V | | DSVKGRFTIFRDNAKNSLYLQMNSLRAEDTA |
| | mutant 1 | to A back-mutation | | LYYCAKDMKGSGTYGGWFDTWGQGTLVTV |
| | | in framework region | | SSASTKGPSVFPLAPCSRSTSESTAALGCLVK |
| | | to germline | | DYFPEPVTVSWNSGALTSGVHTFPAVLQSSG |
| | | highlighted with | | LYSLSSVVTVPSSSLGTKTYTCNVDHKPSNTK |
| | | IgG1 disabled | | VDKRVESKYGPPCPPCPAPELAGAPSVFLFPP |
| | | (LAGA) constant | | KPKDTLMISRTPEVTCVVVDVSQEDPEVQFN |
| | | region | | WYVDGVEVHNAKTKPREEQFNSTYRVVSVL |
| | | | | TVLHQDWLNGKEYKCKVSNKGLPSSIEKTIS |
| | | | | KAKGQPREPQVYTLPPSQEEMTKNQVSLTCL |
| | | | | VKGFYPSDIAVEWESNGQPENNYKTTPPVLD |
| | | | | SDGSFFLYSRLTVDKSRWQEGNVFSCSVMHE |
| | | | | ALHNHYTQKSLSLSLGK |
| 48 | Mutated | Amino acid | | EVQLVESGGGLVQPGRSLRLSCAASGFTFDD |
| | 1D05- | sequence of 1D05 | | YAMHWVRQVPGKGLEWVSGISWIRTGIGYA |
| | HC | heavy chain with F | | DSVKGRFTISRDNAKNSLYLQMNSLRAEDTA |
| | mutant 2 | to S back-mutation | | LYYCAKDMKGSGTYGGWFDTWGQGTLVTV |
| | | in framework region | | SSASTKGPSVFPLAPCSRSTSESTAALGCLVK |
| | | to germline | | DYFPEPVTVSWNSGALTSGVHTFPAVLQSSG |
| | | highlighted with | | LYSLSSVVTVPSSSLGTKTYTCNVDHKPSNTK |
| | | IgG1 disabled | | VDKRVESKYGPPCPPCPAPELAGAPSVFLFPP |
| | | (LAGA) constant | | KPKDTLMISRTPEVTCVVVDVSQEDPEVQFN |
| | | region | | WYVDGVEVHNAKTKPREEQFNSTYRVVSVL |
| | | | | TVLHQDWLNGKEYKCKVSNKGLPSSIEKTIS |
| | | | | KAKGQPREPQVYTLPPSQEEMTKNQVSLTCL |
| | | | | VKGFYPSDIAVEWESNGQPENNYKTTPPVLD |
| | | | | SDGSFFLYSRLTVDKSRWQEGNVFSCSVMHE |
| | | | | ALHNHYTQKSLSLSLGK |
| 49 | Mutated | Amino acid | | EVQLVESGGGLVQPGRSLRLSCAASGFTFDD |
| | 1D05- | sequence of 1D05 | | YAMHWVRQVPGKGLEWVSGISWIRTGIGYA |
| | HC | heavy chain with | | DSVKGRFTIFRDNAKNSLYLQMNSLRAEDTA |
| | mutant 3 | ELLG to-PVA | | LYYCAKDMKGSGTYGGWFDTWGQGTLVTV |
| | | back-mutation in | | SSASTKGPSVFPLAPCSRSTSESTAALGCLVK |
| | | constant region to | | DYFPEPVTVSWNSGALTSGVHTFPAVLQSSG |
| | | germline highlighted | | LYSLSSVVTVPSSSLGTKTYTCNVDHKPSNTK |
| | | | | VDKRVESKYGPPCPPCPAP- |
| | | | | PVAGPSVFLFPPKPKDTLMISRTPEVTCVVVD |
| | | | | VSQEDPEVQFNWYVDGVEVHNAKTKPREEQ |
| | | | | FNSTYRVVSVLTVLHQDWLNGKEYKCKVSN |
| | | | | KGLPSSIEKTISKAKGQPREPQVYTLPPSQEEM |
| | | | | TKNQVSLTCLVKGFYPSDIAVEWESNGQPEN |
| | | | | NYKTTPPVLDSDGSFFLYSRLTVDKSRWQEG |
| | | | | NVFSCSVMHEALHNHYTQKSLSLSLGK |
| 50 | Mutated | Amino acid | | DIQMTQSPSSLSASVGDRVTITCRASQSISSYL |
| | 1D05- | sequence of 1D05 | | NWYQQKPGKAPKLLIYAASSLQSGVPSRFSG |
| | LC | kappa light chain | | SGSGTDFTLTISSLQPEDFATYYCQQSYSTPIT |
| | mutant 1 | with V to A back- | | FGQGTRLEIKRTVAAPSVFIFPPSDEQLKSGTA |
| | | mutation in CDRL2 | | SVVCLLNNFYPREAKVQWKVDNALQSGNSQ |
| | | to germline | | ESVTEQDSKDSTYSLSSTLTLSKADYEKHKVY |
| | | highlighted | | ACEVTHQGLSSPVTKSFNRGEC |
| 51 | Mutated | Amino acid | | DIQMTQSPSSLSASVGDRVTITCRASQSISSYL |
| | 1D05- | sequence of 1D05 | | NWYQQKPGKAPKLFIYVASSLQSGVPSRFSG |
| | LC | kappa light chain | | SGSGTDFTLTISSLQPEDFATYYCQQSYSTPIT |
| | mutant 2 | with L to F back- | | FGQGTRLEIKRTVAAPSVFIFPPSDEQLKSGTA |
| | | mutation in | | SVVCLLNNFYPREAKVQWKVDNALQSGNSQ |
| | | framework to | | ESVTEQDSKDSTYSLSSTLTLSKADYEKHKVY |
| | | germline highlighted | | ACEVTHQGLSSPVTKSFNRGEC |
| 52 | 411B08 | Amino acid | | GFTFSSYW |
| | CDRH1 | sequence of CDRH1 | | |
| | (IMGT) | of 411B08 using | | |
| | | IMGT | | |
| 53 | 411B08 | Amino acid | | IKEDGSEK |
| | CDRH2 | sequence of CDRH2 | | |
| | (IMGT) | of 411B08 using | | |
| | | IMGT | | |
| 54 | 411B08 | Amino acid | | ARNRLYSDFLDN |
| | CDRH3 | sequence of CDRH3 | | |
| | (IMGT) | of 411B08 using | | |
| | | IMGT | | |
| 55 | 411B08 | Amino acid | | SYWMS |
| | CDRH1 | sequence of CDRH1 | | |
| | (Kabat) | of 411B08 using | | |
| | | Kabat | | |
| 56 | 411B08 | Amino acid | | NIKEDGSEKYYVDSVKG |
| | CDRH2 | sequence of CDRH2 | | |
| | (Kabat) | of 411B08 using | | |
| | | Kabat | | |
| 57 | 411B08 | Amino acid | | NRLYSDFLDN |
| | CDRH3 | sequence of CDRH3 | | |
| | (Kabat) | of 411B08 using | | |
| | | Kabat | | |
| 58 | 411B08 | Amino acid | | EVQLVESGGGLVQPGGSLRLSCAASGFTFSSY |
| | -Heavy | sequence of V_{H} of | | WMSWVRQAPGKGLEWVANIKEDGSEKYYV |
| | chain | 411B08 | | DSVKGRFTISRDNAKNSLYLQMNSLRAEDTS |
| | variable | | | VYYCARNRLYSDFLDNWGQGTLVTVSS |
| | region | | | |
| 59 | 411B08 | Nucleic acid | | GAGGTGCAGCTGGTGGAGTCTGGGGGAGG |
| | -Heavy | sequence of V_{H} of | | CTTGGTCCAGCCTGGGGGGTCCCTGAGACT |
| | chain | 411B08 | | CTCCTGTGCAGCCTCTGGATTCACGTTTAGT |
| | variable | | | AGCTATTGGATGAGTTGGGTCCGCCAGGCT |
| | region | | | CCAGGGAAGGGGCTGGAGTGGGTGGCCAA |
| | | | | CATCAAAGAAGATGGAAGTGAGAAATACT |
| | | | | ATGTCGACTCTGTGAAGGGCCGATTCACCA |
| | | | | TCTCCAGAGACAACGCCAAGAACTCACTGT |
| | | | | ATCTGCAAATGAACAGCCTGAGAGCCGAGG |
| | | | | ACACGTCTGTGTATTACTGTGCGAGAAATC |
| | | | | GACTCTACAGTGACTTCCTTGACAACTGGG |
| | | | | GCCAGGGAACCCTGGTCACCGTCTCCTCAG |
| 60 | 411B08 | Amino acid | | EVQLVESGGGLVQPGGSLRLSCAASGFTFSSY |
| | -full | sequence of 411B08 | | WMSWVRQAPGKGLEWVANIKEDGSEKYYV |
| | heavy | heavy chain | | DSVKGRFTISRDNAKNSLYLQMNSLRAEDTS |
| | chain | | | VYYCARNRLYSDFLDNWGQGTLVTVSSAST |
| | sequence | | | KGPSVFPLAPSSKSTSGGTAALGCLVKDYFPE |
| | | | | PVTVSWNSGALTSGVHTFPAVLQSSGLYSLSS |
| | | | | VVTVPSSSLGTQTYICNVNHKPSNTKVDKKV |
| | | | | EPKSCDKTHTCPPCPAPELLGGPSVFLFPPKPK |
| | | | | DTLMISRTPEVTCVVVDVSHEDPEVKFNWYV |
| | | | | DGVEVHNAKTKPREEQYNSTYRVVSVLTVL |
| | | | | HQDWLNGKEYKCKVSNKALPAPIEKTISKAK |
| | | | | GQPREPQVYTLPPSRDELTKNQVSLTCLVKGF |
| | | | | YPSDIAVEWESNGQPENNYKTTPPVLDSDGSF |
| | | | | FLYSKLTVDKSRWQQGNVFSCSVMHEALHN |
| | | | | HYTQKSLSLSPGK |
| 61 | 411B08 | Nucleic acid | | GAGGTGCAGCTGGTGGAGTCTGGGGGAGG |
| | -full | sequence of 411B08 | | CTTGGTCCAGCCTGGGGGGTCCCTGAGACT |
| | heavy | heavy chain | | CTCCTGTGCAGCCTCTGGATTCACGTTTAGT |
| | chain | | | AGCTATTGGATGAGTTGGGTCCGCCAGGCT |
| | sequence | | | CCAGGGAAGGGGCTGGAGTGGGTGGCCAA |
| | | | | CATCAAAGAAGATGGAAGTGAGAAATACT |
| | | | | ATGTCGACTCTGTGAAGGGCCGATTCACCA |
| | | | | TCTCCAGAGACAACGCCAAGAACTCACTGT |
| | | | | ATCTGCAAATGAACAGCCTGAGAGCCGAGG |
| | | | | ACACGTCTGTGTATTACTGTGCGAGAAATC |
| | | | | GACTCTACAGTGACTTCCTTGACAACTGGG |
| | | | | GCCAGGGAACCCTGGTCACCGTCTCCTCAG |
| | | | | CCAGCACCAAGGGCCCCTCTGTGTTCCCTCT |
| | | | | GGCCCCTTCCAGCAAGTCCACCTCTGGCGG |
| | | | | AACAGCCGCTCTGGGCTGCCTCGTGAAGGA |
| | | | | CTACTTCCCCGAGCCTGTGACCGTGTCCTGG |
| | | | | AACTCTGGCGCTCTGACCAGCGGAGTGCAC |
| | | | | ACCTTCCCTGCTGTGCTGCAGTCCTCCGGCC |
| | | | | TGTACTCCCTGTCCTCCGTCGTGACCGTGCC |
| | | | | TTCCAGCTCTCTGGGCACCCAGACCTACAT |
| | | | | CTGCAACGTGAACCACAAGCCCTCCAACAC |
| | | | | CAAGGTGGACAAGAAGGTGGAACCCAAGT |
| | | | | CCTGCGACAAGACCCACACCTGTCCCCCTT |
| | | | | GTCCTGCCCCTGAACTGCTGGGCGGACCTT |
| | | | | CCGTGTTCCTGTTCCCCCCAAAGCCCAAGG |
| | | | | ACACCCTGATGATCTCCCGGACCCCCGAAG |
| | | | | TGACCTGCGTGGTGGTGGATGTGTCCCACG |
| | | | | AGGACCCTGAAGTGAAGTTCAATTGGTACG |
| | | | | TGGACGGCGTGGAAGTGCACAACGCCAAG |
| | | | | ACCAAGCCTAGAGAGGAACAGTACAACTCC |
| | | | | ACCTACCGGGTGGTGTCCGTGCTGACCGTG |
| | | | | CTGCACCAGGATTGGCTGAACGGCAAAGAG |
| | | | | TACAAGTGCAAGGTGTCCAACAAGGCCCTG |
| | | | | CCTGCCCCCATCGAAAAGACCATCTCCAAG |
| | | | | GCCAAGGGCCAGCCCCGGGAACCCCAGGT |
| | | | | GTACACACTGCCCCCTAGCAGGGACGAGCT |
| | | | | GACCAAGAACCAGGTGTCCCTGACCTGTCT |
| | | | | CGTGAAAGGCTTCTACCCCTCCGATATCGC |
| | | | | CGTGGAATGGGAGTCCAACGGCCAGCCTGA |
| | | | | GAACAACTACAAGACCACCCCCCCTGTGCT |
| | | | | GGACTCCGACGGCTCATTCTTCCTGTACAG |
| | | | | CAAGCTGACAGTGGACAAGTCCCGGTGGCA |
| | | | | GCAGGGCAACGTGTTCTCCTGCTCCGTGAT |
| | | | | GCACGAGGCCCTGCACAACCACTACACCCA |
| | | | | GAAGTCCCTGTCCCTGAGCCCCGGCAAG |
| 62 | 411B08 | Amino acid | | QGVSSW |
| | CDRL1 | sequence of CDRL1 | | |
| | (IMGT) | of 411B08 using | | |
| | | IMGT | | |
| 63 | 411B08 | Amino acid | | GAS |
| | CDRL2 | sequence of CDRL2 | | |
| | (IMGT) | of 411B08 using | | |
| | | IMGT | | |
| 64 | 411B08 | Amino acid | | QQANSIPFT |
| | CDRL3 | sequence of CDRL3 | | |
| | (IMGT) | of 411B08 using | | |
| | | IMGT | | |
| 65 | 411B08 | Amino acid | | RASQGVSSWLA |
| | CDRL1 | sequence of CDRL1 | | |
| | (Kabat) | of 411B08 using | | |
| | | Kabat | | |
| 66 | 411B08 | Amino acid | | GASSLQS |
| | CDRL2 | sequence of CDRL2 | | |
| | (Kabat) | of 411B08 using | | |
| | | Kabat | | |
| 67 | 411B08 | Amino acid | | QQANSIPFT |
| | CDRL3 | sequence of CDRL3 | | |
| | (Kabat) | of 411B08 using | | |
| | | Kabat | | |
| 68 | 411B08 | Amino acid | | DIQMTQSPSSVSASVGDRVTITCRASQGVSSW |
| | -Light | sequence of V_{L} of | | LAWYQQKSGKAPKLLIYGASSLQSGVPSRFS |
| | chain | 411B08 | | GSGSGTEFILTISSLQPEDFATYYCQQANSIPFT |
| | variable | | | FGPGTKVDIK |
| | region | | | |
| 69 | 411B08 | Nucleic acid | | GACATCCAGATGACCCAGTCTCCATCTTCC |
| | -Light | sequence of V_{L} of | | GTGTCTGCATCTGTCGGAGACAGAGTCACC |
| | chain | 411B08 | | ATCACTTGTCGGGCGAGTCAGGGTGTTAGC |
| | variable | | | AGCTGGTTAGCCTGGTATCAGCAGAAATCA |
| | region | | | GGGAAAGCCCCTAAGCTCCTGATCTATGGT |
| | | | | GCATCCAGTTTGCAAAGTGGGGTCCCATCA |
| | | | | AGATTCAGCGGCAGTGGATCTGGGACAGAG |
| | | | | TTCATTCTCACCATCAGCAGCCTGCAGCCTG |
| | | | | AAGATTTTGCAACTTACTATTGTCAACAGG |
| | | | | CTAACAGTATCCCATTCACTTTCGGCCCTGG |
| | | | | GACCAAAGTGGATATCAAAC |
| 70 | 411B08 | Amino acid | | DIQMTQSPSSVSASVGDRVTITCRASQGVSSW |
| | -full | sequence of 411B08 | | LAWYQQKSGKAPKLLIYGASSLQSGVPSRFS |
| | light | light chain | | GSGSGTEFILTISSLQPEDFATYYCQQANSIPFT |
| | chain | | | FGPGTKVDIKRTVAAPSVFIFPPSDEQLKSGTA |
| | sequence | | | SVVCLLNNFYPREAKVQWKVDNALQSGNSQ |
| | | | | ESVTEQDSKDSTYSLSSTLTLSKADYEKHKVY |
| | | | | ACEVTHQGLSSPVTKSFNRGEC |
| 71 | 411B08 | Nucleic acid | | GACATCCAGATGACCCAGTCTCCATCTTCC |
| | -full | sequence of 411B08 | | GTGTCTGCATCTGTCGGAGACAGAGTCACC |
| | light | light chain | | ATCACTTGTCGGGCGAGTCAGGGTGTTAGC |
| | chain | | | AGCTGGTTAGCCTGGTATCAGCAGAAATCA |
| | sequence | | | GGGAAAGCCCCTAAGCTCCTGATCTATGGT |
| | | | | GCATCCAGTTTGCAAAGTGGGGTCCCATCA |
| | | | | AGATTCAGCGGCAGTGGATCTGGGACAGAG |
| | | | | TTCATTCTCACCATCAGCAGCCTGCAGCCTG |
| | | | | AAGATTTTGCAACTTACTATTGTCAACAGG |
| | | | | CTAACAGTATCCCATTCACTTTCGGCCCTGG |
| | | | | GACCAAAGTGGATATCAAACGTACGGTGGC |
| | | | | CGCTCCCTCCGTGTTCATCTTCCCACCTTCC |
| | | | | GACGAGCAGCTGAAGTCCGGCACCGCTTCT |
| | | | | GTCGTGTGCCTGCTGAACAACTTCTACCCCC |
| | | | | GCGAGGCCAAGGTGCAGTGGAAGGTGGAC |
| | | | | AACGCCCTGCAGTCCGGCAACTCCCAGGAA |
| | | | | TCCGTGACCGAGCAGGACTCCAAGGACAGC |
| | | | | ACCTACTCCCTGTCCTCCACCCTGACCCTGT |
| | | | | CCAAGGCCGACTACGAGAAGCACAAGGTG |
| | | | | TACGCCTGCGAAGTGACCCACCAGGGCCTG |
| | | | | TCTAGCCCCGTGACCAAGTCTTTCAACCGG |
| | | | | GGCGAGTGT |
| 72 | 411C04 | Amino acid | | GFTFSSYW |
| | CDRH1 | sequence of CDRH1 | | |
| | (IMGT) | of 411C04 using | | |
| | | IMGT | | |
| 73 | 411C04 | Amino acid | | IKEDGSEK |
| | CDRH2 | sequence of CDRH2 | | |
| | (IMGT) | of 411C04 using | | |
| | | IMGT | | |
| 74 | 411C04 | Amino acid | | ARVRLYSDFLDY |
| | CDRH3 | sequence of CDRH3 | | |
| | (IMGT) | of 411C04 using | | |
| | | IMGT | | |
| 75 | 411C04 | Amino acid | | SYWMS |
| | CDRH1 | sequence of CDRH1 | | |
| | (Kabat) | of 411C04 using | | |
| | | Kabat | | |
| 76 | 411C04 | Amino acid | | NIKEDGSEKYYVDSLKG |
| | CDRH2 | sequence of CDRH2 | | |
| | (Kabat) | of 411C04 using | | |
| | | Kabat | | |
| 77 | 411C04 | Amino acid | | VRLYSDFLDY |
| | CDRH3 | sequence of CDRH3 | | |
| | (Kabat) | of 411C04 using | | |
| | | Kabat | | |
| 78 | 411C04 | Amino acid | | EVQLVDSGGGLVQPGGSLRLSCAASGFTFSSY |
| | -Heavy | sequence of V_{H} of | | WMSWVRQAPGKGLEWVANIKEDGSEKYYV |
| | chain | 411C04 | | DSLKGRFTISRDNAKNSLYLQMNSLRAEDTS |
| | variable | | | VYYCARVRLYSDFLDYWGQGTLVTVSS |
| | region | | | |
| 79 | 411C04 | Nucleic acid | | GAGGTGCAGCTGGTGGACTCTGGGGGAGGC |
| | -Heavy | sequence of V_{H} of | | TTGGTCCAGCCTGGGGGGTCCCTGAGACTC |
| | chain | 411C04 | | TCCTGTGCAGCCTCTGGATTCACGTTTAGTA |
| | variable | | | GCTATTGGATGAGTTGGGTCCGCCAGGCTC |
| | region | | | CAGGAAAGGGGCTGGAGTGGGTGGCCAAC |
| | | | | ATAAAAGAAGATGGAAGTGAGAAATACTA |
| | | | | TGTAGACTCTTTGAAGGGCCGATTCACCAT |
| | | | | CTCCAGAGACAACGCCAAGAACTCACTGTA |
| | | | | TCTGCAAATGAACAGCCTGAGAGCCGAGGA |
| | | | | CACGTCTGTGTATTACTGTGCGAGAGTTCG |
| | | | | ACTCTACAGTGACTTCCTTGACTACTGGGG |
| | | | | CCAGGGAACCCTGGTCACCGTCTCCTCAG |
| 80 | 411C04 | Amino acid | | EVQLVDSGGGLVQPGGSLRLSCAASGFTFSSY |
| | -full | sequence of 411C04 | | WMSWVRQAPGKGLEWVANIKEDGSEKYYV |
| | heavy | heavy chain | | DSLKGRFTISRDNAKNSLYLQMNSLRAEDTS |
| | chain | | | VYYCARVRLYSDFLDYWGQGTLVTVSSAST |
| | sequence | | | KGPSVFPLAPSSKSTSGGTAALGCLVKDYFPE |
| | | | | PVTVSWNSGALTSGVHTFPAVLQSSGLYSLSS |
| | | | | VVTVPSSSLGTQTYICNVNHKPSNTKVDKKV |
| | | | | EPKSCDKTHTCPPCPAPELLGGPSVFLFPPKPK |
| | | | | DTLMISRTPEVTCVVVDVSHEDPEVKFNWYV |
| | | | | DGVEVHNAKTKPREEQYNSTYRVVSVLTVL |
| | | | | HQDWLNGKEYKCKVSNKALPAPIEKTISKAK |
| | | | | GQPREPQVYTLPPSRDELTKNQVSLTCLVKGF |
| | | | | YPSDIAVEWESNGQPENNYKTTPPVLDSDGSF |
| | | | | FLYSKLTVDKSRWQQGNVFSCSVMHEALHN |
| | | | | HYTQKSLSLSPGK |
| 81 | 411C04 | Nucleic acid | | GAGGTGCAGCTGGTGGACTCTGGGGGAGGC |
| | -full | sequence of 411C04 | | TTGGTCCAGCCTGGGGGGTCCCTGAGACTC |
| | heavy | heavy chain | | TCCTGTGCAGCCTCTGGATTCACGTTTAGTA |
| | chain | | | GCTATTGGATGAGTTGGGTCCGCCAGGCTC |
| | sequence | | | CAGGAAAGGGGCTGGAGTGGGTGGCCAAC |
| | | | | ATAAAAGAAGATGGAAGTGAGAAATACTA |
| | | | | TGTAGACTCTTTGAAGGGCCGATTCACCAT |
| | | | | CTCCAGAGACAACGCCAAGAACTCACTGTA |
| | | | | TCTGCAAATGAACAGCCTGAGAGCCGAGGA |
| | | | | CACGTCTGTGTATTACTGTGCGAGAGTTCG |
| | | | | ACTCTACAGTGACTTCCTTGACTACTGGGG |
| | | | | CCAGGGAACCCTGGTCACCGTCTCCTCAGC |
| | | | | CAGCACCAAGGGCCCCTCTGTGTTCCCTCT |
| | | | | GGCCCCTTCCAGCAAGTCCACCTCTGGCGG |
| | | | | AACAGCCGCTCTGGGCTGCCTCGTGAAGGA |
| | | | | CTACTTCCCCGAGCCTGTGACCGTGTCCTGG |
| | | | | AACTCTGGCGCTCTGACCAGCGGAGTGCAC |
| | | | | ACCTTCCCTGCTGTGCTGCAGTCCTCCGGCC |
| | | | | TGTACTCCCTGTCCTCCGTCGTGACCGTGCC |
| | | | | TTCCAGCTCTCTGGGCACCCAGACCTACAT |
| | | | | CTGCAACGTGAACCACAAGCCCTCCAACAC |
| | | | | CAAGGTGGACAAGAAGGTGGAACCCAAGT |
| | | | | CCTGCGACAAGACCCACACCTGTCCCCCTT |
| | | | | GTCCTGCCCCTGAACTGCTGGGCGGACCTT |
| | | | | CCGTGTTCCTGTTCCCCCCAAAGCCCAAGG |
| | | | | ACACCCTGATGATCTCCCGGACCCCCGAAG |
| | | | | TGACCTGCGTGGTGGTGGATGTGTCCCACG |
| | | | | AGGACCCTGAAGTGAAGTTCAATTGGTACG |
| | | | | TGGACGGCGTGGAAGTGCACAACGCCAAG |
| | | | | ACCAAGCCTAGAGAGGAACAGTACAACTCC |
| | | | | ACCTACCGGGTGGTGTCCGTGCTGACCGTG |
| | | | | CTGCACCAGGATTGGCTGAACGGCAAAGAG |
| | | | | TACAAGTGCAAGGTGTCCAACAAGGCCCTG |
| | | | | CCTGCCCCCATCGAAAAGACCATCTCCAAG |
| | | | | GCCAAGGGCCAGCCCCGGGAACCCCAGGT |
| | | | | GTACACACTGCCCCCTAGCAGGGACGAGCT |
| | | | | GACCAAGAACCAGGTGTCCCTGACCTGTCT |
| | | | | CGTGAAAGGCTTCTACCCCTCCGATATCGC |
| | | | | CGTGGAATGGGAGTCCAACGGCCAGCCTGA |
| | | | | GAACAACTACAAGACCACCCCCCCTGTGCT |
| | | | | GGACTCCGACGGCTCATTCTTCCTGTACAG |
| | | | | CAAGCTGACAGTGGACAAGTCCCGGTGGCA |
| | | | | GCAGGGCAACGTGTTCTCCTGCTCCGTGAT |
| | | | | GCACGAGGCCCTGCACAACCACTACACCCA |
| | | | | GAAGTCCCTGTCCCTGAGCCCCGGCAAG |
| 82 | 411C04 | Amino acid | | QGVSSW |
| | CDRL1 | sequence of CDRL1 | | |
| | (IMGT) | of 411C04 using | | |
| | | IMGT | | |
| 83 | 411C04 | Amino acid | | GAS |
| | CDRL2 | sequence of CDRL2 | | |
| | (IMGT) | of 411C04 using | | |
| | | IMGT | | |
| 84 | 411C04 | Amino acid | | QQANSIPFT |
| | CDRL3 | sequence of CDRL3 | | |
| | (IMGT) | of 411C04 using | | |
| | | IMGT | | |
| 85 | 411C04 | Amino acid | | RASQGVSSWLA |
| | CDRL1 | sequence of CDRL1 | | |
| | (Kabat) | of 411C04 using | | |
| | | Kabat | | |
| 86 | 411C04 | Amino acid | | GASSLQS |
| | CDRL2 | sequence of CDRL2 | | |
| | (Kabat) | of 411C04 using | | |
| | | Kabat | | |
| 87 | 411C04 | Amino acid | | QQANSIPFT |
| | CDRL3 | sequence of CDRL3 | | |
| | (Kabat) | of 411C04 using | | |
| | | Kabat | | |
| 88 | 411C04 | Amino acid | | DIQMTQSPSSVSASVGDRVTITCRASQGVSSW |
| | -Light | sequence of V_{L} of | | LAWYQQKSGKAPKLLIYGASSLQSGVPSRFS |
| | chain | 411C04 | | GSGSGTEFILSISSLQPEDFATYYCQQANSIPFT |
| | variable | | | FGPGTKVDIK |
| | region | | | |
| 89 | 411C04 | Nucleic acid | | GACATCCAGATGACCCAGTCTCCATCTTCC |
| | -Light | sequence of V_{L} of | | GTGTCTGCATCTGTCGGAGACAGAGTCACC |
| | chain | 411C04 | | ATCACTTGTCGGGCGAGTCAGGGTGTTAGC |
| | variable | | | AGTTGGTTAGCCTGGTATCAGCAGAAATCA |
| | region | | | GGGAAAGCCCCTAAGCTCCTGATCTATGGT |
| | | | | GCCTCCAGTTTGCAAAGTGGGGTCCCATCA |
| | | | | AGATTCAGCGGCAGTGGATCTGGGACAGAG |
| | | | | TTCATTCTCAGCATCAGCAGCCTGCAGCCT |
| | | | | GAAGATTTTGCAACTTACTATTGTCAACAG |
| | | | | GCTAACAGTATCCCATTCACTTTCGGCCCTG |
| | | | | GGACCAAAGTGGATATCAAAC |
| 90 | 411C04 | Amino acid | | DIQMTQSPSSVSASVGDRVTITCRASQGVSSW |
| | -full | sequence of 411C04 | | LAWYQQKSGKAPKLLIYGASSLQSGVPSRFS |
| | light | light chain | | GSGSGTEFILSISSLQPEDFATYYCQQANSIPFT |
| | chain | | | FGPGTKVDIKRTVAAPSVFIFPPSDEQLKSGTA |
| | sequence | | | SVVCLLNNFYPREAKVQWKVDNALQSGNSQ |
| | | | | ESVTEQDSKDSTYSLSSTLTLSKADYEKHKVY |
| | | | | ACEVTHQGLSSPVTKSFNRGEC |
| 91 | 411C04 | Nucleic acid | | GACATCCAGATGACCCAGTCTCCATCTTCC |
| | -full | sequence of 411C04 | | GTGTCTGCATCTGTCGGAGACAGAGTCACC |
| | light | light chain | | ATCACTTGTCGGGCGAGTCAGGGTGTTAGC |
| | chain | | | AGTTGGTTAGCCTGGTATCAGCAGAAATCA |
| | sequence | | | GGGAAAGCCCCTAAGCTCCTGATCTATGGT |
| | | | | GCCTCCAGTTTGCAAAGTGGGGTCCCATCA |
| | | | | AGATTCAGCGGCAGTGGATCTGGGACAGAG |
| | | | | TTCATTCTCAGCATCAGCAGCCTGCAGCCT |
| | | | | GAAGATTTTGCAACTTACTATTGTCAACAG |
| | | | | GCTAACAGTATCCCATTCACTTTCGGCCCTG |
| | | | | GGACCAAAGTGGATATCAAACGTACGGTGG |
| | | | | CCGCTCCCTCCGTGTTCATCTTCCCACCTTC |
| | | | | CGACGAGCAGCTGAAGTCCGGCACCGCTTC |
| | | | | TGTCGTGTGCCTGCTGAACAACTTCTACCCC |
| | | | | CGCGAGGCCAAGGTGCAGTGGAAGGTGGA |
| | | | | CAACGCCCTGCAGTCCGGCAACTCCCAGGA |
| | | | | ATCCGTGACCGAGCAGGACTCCAAGGACAG |
| | | | | CACCTACTCCCTGTCCTCCACCCTGACCCTG |
| | | | | TCCAAGGCCGACTACGAGAAGCACAAGGT |
| | | | | GTACGCCTGCGAAGTGACCCACCAGGGCCT |
| | | | | GTCTAGCCCCGTGACCAAGTCTTTCAACCG |
| | | | | GGGCGAGTGT |
| 92 | 411D07 | Amino acid | | GGSIISSDW |
| | CDRH1 | sequence of CDRH1 | | |
| | (IMGT) | of 411D07 using | | |
| | | IMGT | | |
| 93 | 411D07 | Amino acid | | IFHSGRT |
| | CDRH2 | sequence of CDRH2 | | |
| | (IMGT) | of 411D07 using | | |
| | | IMGT | | |
| 94 | 411D07 | Amino acid | | ARDGSGSY |
| | CDRH3 | sequence of CDRH3 | | |
| | (IMGT) | of 411D07 using | | |
| | | IMGT | | |
| 95 | 411D07 | Amino acid | | SSDWWN |
| | CDRH1 | sequence of CDRH1 | | |
| | (Kabat) | of 411D07 using | | |
| | | Kabat | | |
| 96 | 411D07 | Amino acid | | EIFHSGRTNYNPSLKS |
| | CDRH2 | sequence of CDRH2 | | |
| | (Kabat) | of 411D07 using | | |
| | | Kabat | | |
| 97 | 411D07 | Amino acid | | DGSGSY |
| | CDRH3 | sequence of CDRH3 | | |
| | (Kabat) | of 411D07 using | | |
| | | Kabat | | |
| 98 | 411D07 | Amino acid | | QVQLQESGPGLVKPSGTLSLTCIVSGGSIISSD |
| | -Heavy | sequence of V_{H} of | | WWNWVRQPPGKGLEWIGEIFHSGRTNYNPSL |
| | chain | 411D07 | | KSRVTISIDKSKNQFSLRLSSVTAADTAVYYC |
| | variable | | | ARDGSGSYWGQGTLVTVSS |
| | region | | | |
| 99 | 411D07 | Nucleic acid | | CAGGTGCAGCTGCAGGAGTCGGGCCCAGG |
| | -Heavy | sequence of V_{H} of | | ACTGGTGAAGCCTTCGGGGACCCTGTCCCT |
| | chain | 411D07 | | CACCTGCATTGTCTCTGGTGGCTCCATCATC |
| | variable | | | AGTAGTGACTGGTGGAATTGGGTCCGCCAG |
| | region | | | CCCCCAGGGAAGGGGCTGGAGTGGATTGG |
| | | | | AGAAATCTTTCATAGTGGGAGGACCAACTA |
| | | | | CAACCCGTCCCTCAAGAGTCGAGTCACCAT |
| | | | | ATCAATAGACAAGTCCAAGAATCAGTTCTC |
| | | | | CCTGAGGCTGAGCTCTGTGACCGCCGCGGA |
| | | | | CACGGCCGTGTATTACTGTGCGAGAGATGG |
| | | | | TTCGGGGAGTTACTGGGGCCAGGGAACCCT |
| | | | | GGTCACCGTCTCCTCAG |
| 100 | 411D07 | Amino acid | | QVQLQESGPGLVKPSGTLSLTCIVSGGSIISSD |
| | -full | sequence of 411D07 | | WWNWVRQPPGKGLEWIGEIFHSGRTNYNPSL |
| | heavy | heavy chain | | KSRVTISIDKSKNQFSLRLSSVTAADTAVYYC |
| | chain | | | ARDGSGSYWGQGTLVTVSSASTKGPSVFPLA |
| | sequence | | | PSSKSTSGGTAALGCLVKDYFPEPVTVSWNS |
| | | | | GALTSGVHTFPAVLQSSGLYSLSSVVTVPSSS |
| | | | | LGTQTYICNVNHKPSNTKVDKKVEPKSCDKT |
| | | | | HTCPPCPAPELLGGPSVFLFPPKPKDTLMISRT |
| | | | | PEVTCVVVDVSHEDPEVKFNWYVDGVEVHN |
| | | | | AKTKPREEQYNSTYRVVSVLTVLHQDWLNG |
| | | | | KEYKCKVSNKALPAPIEKTISKAKGQPREPQV |
| | | | | YTLPPSRDELTKNQVSLTCLVKGFYPSDIAVE |
| | | | | WESNGQPENNYKTTPPVLDSDGSFFLYSKLT |
| | | | | VDKSRWQQGNVFSCSVMHEALHNHYTQKSL |
| | | | | SLSPGK |
| 101 | 411D07 | Nucleic acid | | CAGGTGCAGCTGCAGGAGTCGGGCCCAGG |
| | -full | sequence of 411D07 | | ACTGGTGAAGCCTTCGGGGACCCTGTCCCT |
| | heavy | heavy chain | | CACCTGCATTGTCTCTGGTGGCTCCATCATC |
| | chain | | | AGTAGTGACTGGTGGAATTGGGTCCGCCAG |
| | sequence | | | CCCCCAGGGAAGGGGCTGGAGTGGATTGG |
| | | | | AGAAATCTTTCATAGTGGGAGGACCAACTA |
| | | | | CAACCCGTCCCTCAAGAGTCGAGTCACCAT |
| | | | | ATCAATAGACAAGTCCAAGAATCAGTTCTC |
| | | | | CCTGAGGCTGAGCTCTGTGACCGCCGCGGA |
| | | | | CACGGCCGTGTATTACTGTGCGAGAGATGG |
| | | | | TTCGGGGAGTTACTGGGGCCAGGGAACCCT |
| | | | | GGTCACCGTCTCCTCAGCCAGCACCAAGGG |
| | | | | CCCCTCTGTGTTCCCTCTGGCCCCTTCCAGC |
| | | | | AAGTCCACCTCTGGCGGAACAGCCGCTCTG |
| | | | | GGCTGCCTCGTGAAGGACTACTTCCCCGAG |
| | | | | CCTGTGACCGTGTCCTGGAACTCTGGCGCT |
| | | | | CTGACCAGCGGAGTGCACACCTTCCCTGCT |
| | | | | GTGCTGCAGTCCTCCGGCCTGTACTCCCTGT |
| | | | | CCTCCGTCGTGACCGTGCCTTCCAGCTCTCT |
| | | | | GGGCACCCAGACCTACATCTGCAACGTGAA |
| | | | | CCACAAGCCCTCCAACACCAAGGTGGACAA |
| | | | | GAAGGTGGAACCCAAGTCCTGCGACAAGA |
| | | | | CCCACACCTGTCCCCCTTGTCCTGCCCCTGA |
| | | | | ACTGCTGGGCGGACCTTCCGTGTTCCTGTTC |
| | | | | CCCCCAAAGCCCAAGGACACCCTGATGATC |
| | | | | TCCCGGACCCCCGAAGTGACCTGCGTGGTG |
| | | | | GTGGATGTGTCCCACGAGGACCCTGAAGTG |
| | | | | AAGTTCAATTGGTACGTGGACGGCGTGGAA |
| | | | | GTGCACAACGCCAAGACCAAGCCTAGAGA |
| | | | | GGAACAGTACAACTCCACCTACCGGGTGGT |
| | | | | GTCCGTGCTGACCGTGCTGCACCAGGATTG |
| | | | | GCTGAACGGCAAAGAGTACAAGTGCAAGG |
| | | | | TGTCCAACAAGGCCCTGCCTGCCCCCATCG |
| | | | | AAAAGACCATCTCCAAGGCCAAGGGCCAG |
| | | | | CCCCGGGAACCCCAGGTGTACACACTGCCC |
| | | | | CCTAGCAGGGACGAGCTGACCAAGAACCA |
| | | | | GGTGTCCCTGACCTGTCTCGTGAAAGGCTT |
| | | | | CTACCCCTCCGATATCGCCGTGGAATGGGA |
| | | | | GTCCAACGGCCAGCCTGAGAACAACTACAA |
| | | | | GACCACCCCCCCTGTGCTGGACTCCGACGG |
| | | | | CTCATTCTTCCTGTACAGCAAGCTGACAGT |
| | | | | GGACAAGTCCCGGTGGCAGCAGGGCAACG |
| | | | | TGTTCTCCTGCTCCGTGATGCACGAGGCCCT |
| | | | | GCACAACCACTACACCCAGAAGTCCCTGTC |
| | | | | CCTGAGCCCCGGCAAG |
| 102 | 411D07- | Amino acid | | QSVLYSSNNKNY |
| | CDRL1 | sequence of CDRL1 | | |
| | (IMGT) | of 411D07 using | | |
| | | IMGT | | |
| 103 | 411D07- | Amino acid | | WAS |
| | CDRL2 | sequence of CDRL2 | | |
| | (IMGT) | of 411D07 using | | |
| | | IMGT | | |
| 104 | 411D07- | Amino acid | | QQYYSNRS |
| | CDRL3 | sequence of CDRL3 | | |
| | (IMGT) | of 411D07 using | | |
| | | IMGT | | |
| 105 | 411D07- | Amino acid | | KSSQSVLYSSNNKNYLA |
| | CDRL1 | sequence of CDRL1 | | |
| | (Kabat) | of 411D07 using | | |
| | | Kabat | | |
| 106 | 411D07- | Amino acid | | WASTRES |
| | CDRL2 | sequence of CDRL2 | | |
| | (Kabat) | of 411D07 using | | |
| | | Kabat | | |
| 107 | 411D07- | Amino acid | | QQYYSNRS |
| | CDRL3 | sequence of CDRL3 | | |
| | (Kabat) | of 411D07 using | | |
| | | Kabat | | |
| 108 | 411D07 | Amino acid | | DIVMTQSPDSLAVSLGERATINCKSSQSVLYS |
| | -Light | sequence of V_{L} of | | SNNKNYLAWYQQKSGQPPKLLIYWASTRESG |
| | chain | 411D07 | | VPDRFSGSGSGTDFTLTISSLQTEDVAVYYCQ |
| | variable | | | QYYSNRSFGQGTKLEIK |
| | region | | | |
| 109 | 411D07 | Nucleic acid | | GACATCGTGATGACCCAGTCTCCAGACTCC |
| | -Light | sequence of V_{L} of | | CTGGCTGTGTCTCTGGGCGAGAGGGCCACC |
| | chain | 411D07 | | ATCAACTGCAAGTCCAGCCAGAGTGTTTTA |
| | variable | | | TACAGCTCCAACAATAAGAATTACTTAGCT |
| | region | | | TGGTACCAGCAGAAATCAGGACAGCCTCCT |
| | | | | AAGTTGCTCATTTACTGGGCATCTACCCGG |
| | | | | GAATCCGGGGTCCCTGACCGATTCAGTGGC |
| | | | | AGCGGGTCTGGGACAGATTTCACTCTCACC |
| | | | | ATCAGCAGCCTGCAGACTGAAGATGTGGCA |
| | | | | gtttattactgtcagcaatattatagtaatc |
| | | | | GCAGTTTTGGCCAGGGGACCAAGCTGGAGA |
| | | | | TCAAAC |
| 110 | 411D07 | Amino acid | | DIVMTQSPDSLAVSLGERATINCKSSQSVLYS |
| | -full | sequence of 411D07 | | SNNKNYLAWYQQKSGQPPKLLIYWASTRESG |
| | light | light chain | | VPDRFSGSGSGTDFTLTISSLQTEDVAVYYCQ |
| | chain | | | QYYSNRSFGQGTKLEIKRTVAAPSVFIFPPSDE |
| | sequence | | | QLKSGTASVVCLLNNFYPREAKVQWKVDNA |
| | | | | LQSGNSQESVTEQDSKDSTYSLSSTLTLSKAD |
| | | | | YEKHKVYACEVTHQGLSSPVTKSFNRGEC |
| 111 | 411D07 | Nucleic acid | | GACATCGTGATGACCCAGTCTCCAGACTCC |
| | -full | sequence of 411D07 | | CTGGCTGTGTCTCTGGGCGAGAGGGCCACC |
| | light | light chain | | ATCAACTGCAAGTCCAGCCAGAGTGTTTTA |
| | chain | | | TACAGCTCCAACAATAAGAATTACTTAGCT |
| | sequence | | | TGGTACCAGCAGAAATCAGGACAGCCTCCT |
| | | | | AAGTTGCTCATTTACTGGGCATCTACCCGG |
| | | | | GAATCCGGGGTCCCTGACCGATTCAGTGGC |
| | | | | AGCGGGTCTGGGACAGATTTCACTCTCACC |
| | | | | ATCAGCAGCCTGCAGACTGAAGATGTGGCA |
| | | | | gtttattactgtcagcaatattatagtaatc |
| | | | | GCAGTTTTGGCCAGGGGACCAAGCTGGAGA |
| | | | | TCAAACGTACGGTGGCCGCTCCCTCCGTGT |
| | | | | TCATCTTCCCACCTTCCGACGAGCAGCTGA |
| | | | | AGTCCGGCACCGCTTCTGTCGTGTGCCTGCT |
| | | | | GAACAACTTCTACCCCCGCGAGGCCAAGGT |
| | | | | GCAGTGGAAGGTGGACAACGCCCTGCAGTC |
| | | | | CGGCAACTCCCAGGAATCCGTGACCGAGCA |
| | | | | GGACTCCAAGGACAGCACCTACTCCCTGTC |
| | | | | CTCCACCCTGACCCTGTCCAAGGCCGACTA |
| | | | | CGAGAAGCACAAGGTGTACGCCTGCGAAGT |
| | | | | GACCCACCAGGGCCTGTCTAGCCCCGTGAC |
| | | | | CAAGTCTTTCAACCGGGGCGAGTGT |
| 112 | 385F01- | Amino acid | | GFTFSSYW |
| | CDRH1 | sequence of CDRH1 | | |
| | (IMGT) | of 385F01 using | | |
| | | IMGT | | |
| 113 | 385F01- | Amino acid | | IKEDGSEK |
| | CDRH2 | sequence of CDRH2 | | |
| | (IMGT) | of 385F01 using | | |
| | | IMGT | | |
| 114 | 385F01- | Amino acid | | ARNRLYSDFLDN |
| | CDRH3 | sequence of CDRH3 | | |
| | (IMGT) | of 385F01 using | | |
| | | IMGT | | |
| 115 | 385F01- | Amino acid | | SYWMS |
| | CDRH1 | sequence of CDRH1 | | |
| | (Kabat) | of 385F01 using | | |
| | | Kabat | | |
| 116 | 385F01- | Amino acid | | NIKEDGSEKYYVDSVKG |
| | CDRH2 | sequence of CDRH2 | | |
| | (Kabat) | of 385F01 using | | |
| | | Kabat | | |
| 117 | 385F01- | Amino acid | | NRLYSDFLDN |
| | CDRH3 | sequence of CDRH3 | | |
| | (Kabat) | of 385F01 using | | |
| | | Kabat | | |
| 118 | 385F01- | Amino acid | | EVQLVESGGGLVQPGGSLRLSCAASGFTFSSY |
| | Heavy | sequence of V_{H} of | | WMSWVRQAPGKGLEWVANIKEDGSEKYYV |
| | chain | 385F01 | | DSVKGRFTISRDNAKNSLYLQMNSLRAEDTS |
| | variable | | | VYYCARNRLYSDFLDNWGQGTLVTVSS |
| | region | | | |
| 119 | 385F01- | Nucleic acid | | GAGGTGCAGCTGGTGGAGTCTGGGGGAGG |
| | Heavy | sequence of V_{H} of | | CTTGGTCCAGCCTGGGGGGTCCCTGAGACT |
| | chain | 385F01 | | CTCCTGTGCAGCCTCTGGATTCACGTTTAGT |
| | variable | | | AGCTATTGGATGAGTTGGGTCCGCCAGGCT |
| | region | | | CCAGGGAAGGGGCTGGAGTGGGTGGCCAA |
| | | | | CATCAAAGAAGATGGAAGTGAGAAATACT |
| | | | | ATGTCGACTCTGTGAAGGGCCGATTCACCA |
| | | | | TCTCCAGAGACAACGCCAAGAACTCACTGT |
| | | | | ATCTGCAAATGAACAGCCTGAGAGCCGAGG |
| | | | | ACACGTCTGTGTATTACTGTGCGAGAAATC |
| | | | | GACTCTACAGTGACTTCCTTGACAACTGGG |
| | | | | GCCAGGGAACCCTGGTCACCGTCTCCTCAG |
| 120 | 385F01- | Amino acid | | EVQLVESGGGLVQPGGSLRLSCAASGFTFSSY |
| | full | sequence of385F01 | | WMSWVRQAPGKGLEWVANIKEDGSEKYYV |
| | heavy | heavy chain | | DSVKGRFTISRDNAKNSLYLQMNSLRAEDTS |
| | chain | | | VYYCARNRLYSDFLDNWGQGTLVTVSSAST |
| | sequence | | | KGPSVFPLAPSSKSTSGGTAALGCLVKDYFPE |
| | | | | PVTVSWNSGALTSGVHTFPAVLQSSGLYSLSS |
| | | | | VVTVPSSSLGTQTYICNVNHKPSNTKVDKKV |
| | | | | EPKSCDKTHTCPPCPAPELLGGPSVFLFPPKPK |
| | | | | DTLMISRTPEVTCVVVDVSHEDPEVKFNWYV |
| | | | | DGVEVHNAKTKPREEQYNSTYRVVSVLTVL |
| | | | | HQDWLNGKEYKCKVSNKALPAPIEKTISKAK |
| | | | | GQPREPQVYTLPPSRDELTKNQVSLTCLVKGF |
| | | | | YPSDIAVEWESNGQPENNYKTTPPVLDSDGSF |
| | | | | FLYSKLTVDKSRWQQGNVFSCSVMHEALHN |
| | | | | HYTQKSLSLSPGK |
| 121 | 385F01- | Nucleic acid | | GAGGTGCAGCTGGTGGAGTCTGGGGGAGG |
| | full | sequence of385F01 | | CTTGGTCCAGCCTGGGGGGTCCCTGAGACT |
| | heavy | heavy chain | | CTCCTGTGCAGCCTCTGGATTCACGTTTAGT |
| | chain | | | AGCTATTGGATGAGTTGGGTCCGCCAGGCT |
| | sequence | | | CCAGGGAAGGGGCTGGAGTGGGTGGCCAA |
| | | | | CATCAAAGAAGATGGAAGTGAGAAATACT |
| | | | | ATGTCGACTCTGTGAAGGGCCGATTCACCA |
| | | | | TCTCCAGAGACAACGCCAAGAACTCACTGT |
| | | | | ATCTGCAAATGAACAGCCTGAGAGCCGAGG |
| | | | | ACACGTCTGTGTATTACTGTGCGAGAAATC |
| | | | | GACTCTACAGTGACTTCCTTGACAACTGGG |
| | | | | GCCAGGGAACCCTGGTCACCGTCTCCTCAG |
| | | | | CCAGCACCAAGGGCCCCTCTGTGTTCCCTCT |
| | | | | GGCCCCTTCCAGCAAGTCCACCTCTGGCGG |
| | | | | AACAGCCGCTCTGGGCTGCCTCGTGAAGGA |
| | | | | CTACTTCCCCGAGCCTGTGACCGTGTCCTGG |
| | | | | AACTCTGGCGCTCTGACCAGCGGAGTGCAC |
| | | | | ACCTTCCCTGCTGTGCTGCAGTCCTCCGGCC |
| | | | | TGTACTCCCTGTCCTCCGTCGTGACCGTGCC |
| | | | | TTCCAGCTCTCTGGGCACCCAGACCTACAT |
| | | | | CTGCAACGTGAACCACAAGCCCTCCAACAC |
| | | | | CAAGGTGGACAAGAAGGTGGAACCCAAGT |
| | | | | CCTGCGACAAGACCCACACCTGTCCCCCTT |
| | | | | GTCCTGCCCCTGAACTGCTGGGCGGACCTT |
| | | | | CCGTGTTCCTGTTCCCCCCAAAGCCCAAGG |
| | | | | ACACCCTGATGATCTCCCGGACCCCCGAAG |
| | | | | TGACCTGCGTGGTGGTGGATGTGTCCCACG |
| | | | | AGGACCCTGAAGTGAAGTTCAATTGGTACG |
| | | | | TGGACGGCGTGGAAGTGCACAACGCCAAG |
| | | | | ACCAAGCCTAGAGAGGAACAGTACAACTCC |
| | | | | ACCTACCGGGTGGTGTCCGTGCTGACCGTG |
| | | | | CTGCACCAGGATTGGCTGAACGGCAAAGAG |
| | | | | TACAAGTGCAAGGTGTCCAACAAGGCCCTG |
| | | | | CCTGCCCCCATCGAAAAGACCATCTCCAAG |
| | | | | GCCAAGGGCCAGCCCCGGGAACCCCAGGT |
| | | | | GTACACACTGCCCCCTAGCAGGGACGAGCT |
| | | | | GACCAAGAACCAGGTGTCCCTGACCTGTCT |
| | | | | CGTGAAAGGCTTCTACCCCTCCGATATCGC |
| | | | | CGTGGAATGGGAGTCCAACGGCCAGCCTGA |
| | | | | GAACAACTACAAGACCACCCCCCCTGTGCT |
| | | | | GGACTCCGACGGCTCATTCTTCCTGTACAG |
| | | | | CAAGCTGACAGTGGACAAGTCCCGGTGGCA |
| | | | | GCAGGGCAACGTGTTCTCCTGCTCCGTGAT |
| | | | | GCACGAGGCCCTGCACAACCACTACACCCA |
| | | | | GAAGTCCCTGTCCCTGAGCCCCGGCAAG |
| 122 | 385F01- | Amino acid | | QGVSSW |
| | CDRL1 | sequence of CDRL1 | | |
| | (IMGT) | of 385F01 using | | |
| | | IMGT | | |
| 123 | 385F01- | Amino acid | | GAS |
| | CDRL2 | sequence of CDRL2 | | |
| | (IMGT) | of 385F01 using | | |
| | | IMGT | | |
| 124 | 385F01- | Amino acid | | QQANSIPFT |
| | CDRL3 | sequence of CDRL3 | | |
| | (IMGT) | of 385F01 using | | |
| | | IMGT | | |
| 125 | 385F01- | Amino acid | | RASQGVSSWLA |
| | CDRL1 | sequence of CDRL1 | | |
| | (Kabat) | of 385F01 using | | |
| | | Kabat | | |
| 126 | 385F01- | Amino acid | | GASSLQS |
| | CDRL2 | sequence of CDRL2 | | |
| | (Kabat) | of 385F01 using | | |
| | | Kabat | | |
| 127 | 385F01- | Amino acid | | QQANSIPFT |
| | CDRL3 | sequence of CDRL3 | | |
| | (Kabat) | of 385F01 using | | |
| | | Kabat | | |
| 128 | 385F01- | Amino acid | | DIQMTQSPSSVSASVGDRVTITCRASQGVSSW |
| | Light | sequence of V_{L} of | | LAWYQQKSGKAPKLLIYGASSLQSGVPSRFS |
| | chain | 385F01 | | GSGSGTEFILTISSLQPEDFATYYCQQANSIPFT |
| | variable | | | FGPGTKVDIK |
| | region | | | |
| 129 | 385F01- | Nucleic acid | | GACATCCAGATGACCCAGTCTCCATCTTCC |
| | Light | sequence of V_{L} of | | GTGTCTGCATCTGTCGGAGACAGAGTCACC |
| | chain | 385F01 | | ATCACTTGTCGGGCGAGTCAGGGTGTTAGC |
| | variable | | | AGCTGGTTAGCCTGGTATCAGCAGAAATCA |
| | region | | | GGGAAAGCCCCTAAGCTCCTGATCTATGGT |
| | | | | GCATCCAGTTTGCAAAGTGGGGTCCCATCA |
| | | | | AGATTCAGCGGCAGTGGATCTGGGACAGAG |
| | | | | TTCATTCTCACCATCAGCAGCCTGCAGCCTG |
| | | | | AAGATTTTGCAACTTACTATTGTCAACAGG |
| | | | | CTAACAGTATCCCATTCACTTTCGGCCCTGG |
| | | | | GACCAAAGTGGATATCAAAC |
| 130 | 385F01- | Amino acid | | DIQMTQSPSSVSASVGDRVTITCRASQGVSSW |
| | full light | sequence of385F01 | | LAWYQQKSGKAPKLLIYGASSLQSGVPSRFS |
| | chain | light chain | | GSGSGTEFILTISSLQPEDFATYYCQQANSIPFT |
| | sequence | | | FGPGTKVDIKRTVAAPSVFIFPPSDEQLKSGTA |
| | | | | SVVCLLNNFYPREAKVQWKVDNALQSGNSQ |
| | | | | ESVTEQDSKDSTYSLSSTLTLSKADYEKHKVY |
| | | | | ACEVTHQGLSSPVTKSFNRGEC |
| 131 | 385F01- | Nucleic acid | | GACATCCAGATGACCCAGTCTCCATCTTCC |
| | full light | sequence of385F01 | | GTGTCTGCATCTGTCGGAGACAGAGTCACC |
| | chain | light chain | | ATCACTTGTCGGGCGAGTCAGGGTGTTAGC |
| | sequence | | | AGCTGGTTAGCCTGGTATCAGCAGAAATCA |
| | | | | GGGAAAGCCCCTAAGCTCCTGATCTATGGT |
| | | | | GCATCCAGTTTGCAAAGTGGGGTCCCATCA |
| | | | | AGATTCAGCGGCAGTGGATCTGGGACAGAG |
| | | | | TTCATTCTCACCATCAGCAGCCTGCAGCCTG |
| | | | | AAGATTTTGCAACTTACTATTGTCAACAGG |
| | | | | CTAACAGTATCCCATTCACTTTCGGCCCTGG |
| | | | | GACCAAAGTGGATATCAAACGTACGGTGGC |
| | | | | CGCTCCCTCCGTGTTCATCTTCCCACCTTCC |
| | | | | GACGAGCAGCTGAAGTCCGGCACCGCTTCT |
| | | | | GTCGTGTGCCTGCTGAACAACTTCTACCCCC |
| | | | | GCGAGGCCAAGGTGCAGTGGAAGGTGGAC |
| | | | | AACGCCCTGCAGTCCGGCAACTCCCAGGAA |
| | | | | TCCGTGACCGAGCAGGACTCCAAGGACAGC |
| | | | | ACCTACTCCCTGTCCTCCACCCTGACCCTGT |
| | | | | CCAAGGCCGACTACGAGAAGCACAAGGTG |
| | | | | TACGCCTGCGAAGTGACCCACCAGGGCCTG |
| | | | | TCTAGCCCCGTGACCAAGTCTTTCAACCGG |
| | | | | GGCGAGTGT |
| 132 | 413D08- | Amino acid | | GFTFRIYG |
| | CDRH1 | sequence of CDRH1 | | |
| | (IMGT) | of 413D08 using | | |
| | | IMGT | | |
| 133 | 413D08- | Amino acid | | IWYDGSNK |
| | CDRH2 | sequence of CDRH2 | | |
| | (IMGT) | of 413D08 using | | |
| | | IMGT | | |
| 134 | 413D08- | Amino acid | | ARDMDYFGMDV |
| | CDRH3 | sequence of CDRH3 | | |
| | (IMGT) | of 413D08 using | | |
| | | IMGT | | |
| 135 | 413D08- | Amino acid | | IYGMH |
| | CDRH1 | sequence of CDRH1 | | |
| | (Kabat) | of 413D08 using | | |
| | | Kabat | | |
| 136 | 413D08- | Amino acid | | VIWYDGSNKYYADSVKG |
| | CDRH2 | sequence of CDRH2 | | |
| | (Kabat) | of 413D08 using | | |
| | | Kabat | | |
| 137 | 413D08- | Amino acid | | DMDYFGMDV |
| | CDRH3 | sequence of CDRH3 | | |
| | (Kabat) | of 413D08 using | | |
| | | Kabat | | |
| 138 | 413D08 | Amino acid | | QVQLVESGGGVVQPGRSLRLSCAASGFTFRIY |
| | -Heavy | sequence of V_{H} of | | GMHWVRQAPGKGLEWVAVIWYDGSNKYYA |
| | chain | 413D08 | | DSVKGRFTISRDNSDNTLYLQMNSLRAEDTA |
| | variable | | | VYYCARDMDYFGMDVWGQGTTVTVSS |
| | region | | | |
| 139 | 413D08 | Nucleic acid | | CAGGTGCAGCTGGTGGAGTCTGGGGGAGGC |
| | -Heavy | sequence of V_{H} of | | GTGGTCCAGCCTGGGAGGTCCCTGAGACTC |
| | chain | 413D08 | | TCCTGTGCAGCGTCTGGATTCACCTTCCGTA |
| | variable | | | TTTATGGCATGCACTGGGTCCGCCAGGCTC |
| | region | | | CAGGCAAGGGGCTGGAGTGGGTGGCAGTT |
| | | | | ATATGGTATGATGGAAGTAATAAATACTAT |
| | | | | GCTGACTCCGTGAAGGGCCGATTCACCATC |
| | | | | TCCAGAGACAATTCCGACAACACGCTGTAT |
| | | | | CTGCAAATGAACAGCCTGAGAGCCGAGGA |
| | | | | CACGGCTGTGTATTACTGTGCGAGAGATAT |
| | | | | GGACTACTTCGGTATGGACGTCTGGGGCCA |
| | | | | AGGGACCACGGTCACCGTCTCCTCAG |
| 140 | 413D08 | Amino acid | | QVQLVESGGGVVQPGRSLRLSCAASGFTFRIY |
| | -full | sequence of 413D08 | | GMHWVRQAPGKGLEWVAVIWYDGSNKYYA |
| | heavy | heavy chain | | DSVKGRFTISRDNSDNTLYLQMNSLRAEDTA |
| | chain | | | VYYCARDMDYFGMDVWGQGTTVTVSSAST |
| | sequence | | | KGPSVFPLAPSSKSTSGGTAALGCLVKDYFPE |
| | | | | PVTVSWNSGALTSGVHTFPAVLQSSGLYSLSS |
| | | | | VVTVPSSSLGTQTYICNVNHKPSNTKVDKKV |
| | | | | EPKSCDKTHTCPPCPAPELLGGPSVFLFPPKPK |
| | | | | DTLMISRTPEVTCVVVDVSHEDPEVKFNWYV |
| | | | | DGVEVHNAKTKPREEQYNSTYRVVSVLTVL |
| | | | | HQDWLNGKEYKCKVSNKALPAPIEKTISKAK |
| | | | | GQPREPQVYTLPPSRDELTKNQVSLTCLVKGF |
| | | | | YPSDIAVEWESNGQPENNYKTTPPVLDSDGSF |
| | | | | FLYSKLTVDKSRWQQGNVFSCSVMHEALHN |
| | | | | HYTQKSLSLSPGK |
| 141 | 413D08 | Nucleic acid | | CAGGTGCAGCTGGTGGAGTCTGGGGGAGGC |
| | -full | sequence of 413D08 | | GTGGTCCAGCCTGGGAGGTCCCTGAGACTC |
| | heavy | heavy chain | | TCCTGTGCAGCGTCTGGATTCACCTTCCGTA |
| | chain | | | TTTATGGCATGCACTGGGTCCGCCAGGCTC |
| | sequence | | | CAGGCAAGGGGCTGGAGTGGGTGGCAGTT |
| | | | | ATATGGTATGATGGAAGTAATAAATACTAT |
| | | | | GCTGACTCCGTGAAGGGCCGATTCACCATC |
| | | | | TCCAGAGACAATTCCGACAACACGCTGTAT |
| | | | | CTGCAAATGAACAGCCTGAGAGCCGAGGA |
| | | | | CACGGCTGTGTATTACTGTGCGAGAGATAT |
| | | | | GGACTACTTCGGTATGGACGTCTGGGGCCA |
| | | | | AGGGACCACGGTCACCGTCTCCTCAGCCAG |
| | | | | CACCAAGGGCCCCTCTGTGTTCCCTCTGGCC |
| | | | | CCTTCCAGCAAGTCCACCTCTGGCGGAACA |
| | | | | GCCGCTCTGGGCTGCCTCGTGAAGGACTAC |
| | | | | TTCCCCGAGCCTGTGACCGTGTCCTGGAAC |
| | | | | TCTGGCGCTCTGACCAGCGGAGTGCACACC |
| | | | | TTCCCTGCTGTGCTGCAGTCCTCCGGCCTGT |
| | | | | ACTCCCTGTCCTCCGTCGTGACCGTGCCTTC |
| | | | | CAGCTCTCTGGGCACCCAGACCTACATCTG |
| | | | | CAACGTGAACCACAAGCCCTCCAACACCAA |
| | | | | GGTGGACAAGAAGGTGGAACCCAAGTCCT |
| | | | | GCGACAAGACCCACACCTGTCCCCCTTGTC |
| | | | | CTGCCCCTGAACTGCTGGGCGGACCTTCCG |
| | | | | TGTTCCTGTTCCCCCCAAAGCCCAAGGACA |
| | | | | CCCTGATGATCTCCCGGACCCCCGAAGTGA |
| | | | | CCTGCGTGGTGGTGGATGTGTCCCACGAGG |
| | | | | ACCCTGAAGTGAAGTTCAATTGGTACGTGG |
| | | | | ACGGCGTGGAAGTGCACAACGCCAAGACC |
| | | | | AAGCCTAGAGAGGAACAGTACAACTCCACC |
| | | | | TACCGGGTGGTGTCCGTGCTGACCGTGCTG |
| | | | | CACCAGGATTGGCTGAACGGCAAAGAGTAC |
| | | | | AAGTGCAAGGTGTCCAACAAGGCCCTGCCT |
| | | | | GCCCCCATCGAAAAGACCATCTCCAAGGCC |
| | | | | AAGGGCCAGCCCCGGGAACCCCAGGTGTAC |
| | | | | ACACTGCCCCCTAGCAGGGACGAGCTGACC |
| | | | | AAGAACCAGGTGTCCCTGACCTGTCTCGTG |
| | | | | AAAGGCTTCTACCCCTCCGATATCGCCGTG |
| | | | | GAATGGGAGTCCAACGGCCAGCCTGAGAA |
| | | | | CAACTACAAGACCACCCCCCCTGTGCTGGA |
| | | | | CTCCGACGGCTCATTCTTCCTGTACAGCAA |
| | | | | GCTGACAGTGGACAAGTCCCGGTGGCAGCA |
| | | | | GGGCAACGTGTTCTCCTGCTCCGTGATGCA |
| | | | | CGAGGCCCTGCACAACCACTACACCCAGAA |
| | | | | GTCCCTGTCCCTGAGCCCCGGCAAG |
| 142 | 413D08 | Amino acid | | QGIRND |
| | CDRL1 | sequence of CDRL1 | | |
| | (IMGT) | of 413D08 using | | |
| | | IMGT | | |
| 143 | 413D08 | Amino acid | | AAS |
| | CDRL2 | sequence of CDRL2 | | |
| | (IMGT) | of 413D08 using | | |
| | | IMGT | | |
| 144 | 413D08 | Amino acid | | LQHNSYPRT |
| | CDRL3 | sequence of CDRL3 | | |
| | (IMGT) | of 413D08 using | | |
| | | IMGT | | |
| 145 | 413D08 | Amino acid | | RASQGIRNDLG |
| | CDRL1 | sequence of CDRL1 | | |
| | (Kabat) | of 413D08 using | | |
| | | Kabat | | |
| 146 | 413D08 | Amino acid | | AASSLQS |
| | CDRL2 | sequence of CDRL2 | | |
| | (Kabat) | of 413D08 using | | |
| | | Kabat | | |
| 147 | 413D08 | Amino acid | | LQHNSYPRT |
| | CDRL3 | sequence of CDRL3 | | |
| | (Kabat) | of 413D08 using | | |
| | | Kabat | | |
| 148 | 413D08 | Amino acid | | DLQMTQSPSSLSASVGDRVTITCRASQGIRND |
| | -Light | sequence of V_{L} of | | LGWYQQKPGKAPKRLIYAASSLQSGVPSRFS |
| | chain | 413D08 | | GSGSGTEFTLTISSLQPEDFATYYCLQHNSYPR |
| | variable | | | TFGQGTKVEIK |
| | region | | | |
| 149 | 413D08 | Nucleic acid | | GACCTCCAGATGACCCAGTCTCCATCCTCC |
| | -Light | sequence of V_{L} of | | CTGTCTGCATCTGTAGGAGACAGAGTCACC |
| | chain | 413D08 | | ATCACTTGCCGGGCAAGTCAGGGCATTAGA |
| | variable | | | AATGATTTAGGCTGGTATCAGCAGAAACCA |
| | region | | | GGGAAAGCCCCTAAGCGCCTGATCTATGCT |
| | | | | GCATCCAGTTTGCAAAGTGGGGTCCCATCA |
| | | | | AGGTTCAGCGGCAGTGGATCTGGGACAGAA |
| | | | | TTCACTCTCACAATCAGCAGCCTGCAGCCT |
| | | | | GAAGATTTTGCAACTTATTACTGTCTACAGC |
| | | | | ATAATAGTTACCCTCGGACGTTCGGCCAAG |
| | | | | GGACCAAGGTGGAAATCAAAC |
| 150 | 413D08 | Amino acid | | DLQMTQSPSSLSASVGDRVTITCRASQGIRND |
| | -full | sequence of 413D08 | | LGWYQQKPGKAPKRLIYAASSLQSGVPSRFS |
| | light | light chain | | GSGSGTEFTLTISSLQPEDFATYYCLQHNSYPR |
| | chain | | | TFGQGTKVEIKRTVAAPSVFIFPPSDEQLKSGT |
| | sequence | | | ASVVCLLNNFYPREAKVQWKVDNALQSGNS |
| | | | | QESVTEQDSKDSTYSLSSTLTLSKADYEKHKV |
| | | | | YACEVTHQGLSSPVTKSFNRGEC |
| 151 | 413D08 | Nucleic acid | | GACCTCCAGATGACCCAGTCTCCATCCTCC |
| | -full | sequence of 413D08 | | CTGTCTGCATCTGTAGGAGACAGAGTCACC |
| | light | light chain | | ATCACTTGCCGGGCAAGTCAGGGCATTAGA |
| | chain | | | AATGATTTAGGCTGGTATCAGCAGAAACCA |
| | sequence | | | GGGAAAGCCCCTAAGCGCCTGATCTATGCT |
| | | | | GCATCCAGTTTGCAAAGTGGGGTCCCATCA |
| | | | | AGGTTCAGCGGCAGTGGATCTGGGACAGAA |
| | | | | TTCACTCTCACAATCAGCAGCCTGCAGCCT |
| | | | | GAAGATTTTGCAACTTATTACTGTCTACAGC |
| | | | | ATAATAGTTACCCTCGGACGTTCGGCCAAG |
| | | | | GGACCAAGGTGGAAATCAAACGTACGGTG |
| | | | | GCCGCTCCCTCCGTGTTCATCTTCCCACCTT |
| | | | | CCGACGAGCAGCTGAAGTCCGGCACCGCTT |
| | | | | CTGTCGTGTGCCTGCTGAACAACTTCTACCC |
| | | | | CCGCGAGGCCAAGGTGCAGTGGAAGGTGG |
| | | | | ACAACGCCCTGCAGTCCGGCAACTCCCAGG |
| | | | | AATCCGTGACCGAGCAGGACTCCAAGGACA |
| | | | | GCACCTACTCCCTGTCCTCCACCCTGACCCT |
| | | | | GTCCAAGGCCGACTACGAGAAGCACAAGG |
| | | | | TGTACGCCTGCGAAGTGACCCACCAGGGCC |
| | | | | TGTCTAGCCCCGTGACCAAGTCTTTCAACC |
| | | | | GGGGCGAGTGT |
| 152 | 386H03 | Amino acid | | GGSISSSDW |
| | CDRH1 | sequence of CDRH1 | | |
| | (IMGT) | of386H03 using | | |
| | | IMGT | | |
| 153 | 386H03 | Amino acid | | IFHSGNT |
| | CDRH2 | sequence of CDRH2 | | |
| | (IMGT) | of386H03 using | | |
| | | IMGT | | |
| 154 | 386H03 | Amino acid | | VRDGSGSY |
| | CDRH3 | sequence of CDRH3 | | |
| | (IMGT) | of386H03 using | | |
| | | IMGT | | |
| 155 | 386H03 | Amino acid | | SSDWWS |
| | CDRH1 | sequence of CDRH1 | | |
| | (Kabat) | of386H03 using | | |
| | | Kabat | | |
| 156 | 386H03 | Amino acid | | EIFHSGNTNYNPSLKS |
| | CDRH2 | sequence of CDRH2 | | |
| | (Kabat) | of386H03 using | | |
| | | Kabat | | |
| 157 | 386H03 | Amino acid | | DGSGSY |
| | CDRH3 | sequence of CDRH3 | | |
| | (Kabat) | of386H03 using | | |
| | | Kabat | | |
| 158 | 386H03 | Amino acid | | QVQLQESGPGLVKPSGTLSLTCAVSGGSISSS |
| | -Heavy | sequence of V_{H} of | | DWWSWVRQPPGKGLEWIGEIFHSGNTNYNPS |
| | chain | 386H03 | | LKSRVTISVDKSKNQISLRLNSVTAADTAVYY |
| | variable | | | CVRDGSGSYWGQGTLVTVSS |
| | region | | | |
| 159 | 386H03 | Nucleic acid | | CAGGTGCAGCTGCAGGAGTCGGGCCCAGG |
| | -Heavy | sequence of V_{H} of | | ACTGGTGAAGCCTTCGGGGACCCTGTCCCT |
| | chain | 386H03 | | CACCTGCGCTGTCTCTGGTGGCTCCATCAGC |
| | variable | | | AGTAGTGACTGGTGGAGTTGGGTCCGCCAG |
| | region | | | CCCCCAGGGAAGGGGCTGGAGTGGATTGG |
| | | | | GGAAATCTTTCATAGTGGGAACACCAACTA |
| | | | | CAACCCGTCCCTCAAGAGTCGAGTCACCAT |
| | | | | ATCAGTAGACAAGTCCAAGAACCAGATCTC |
| | | | | CCTGAGGCTGAACTCTGTGACCGCCGCGGA |
| | | | | CACGGCCGTGTATTACTGTGTGAGAGATGG |
| | | | | TTCGGGGAGTTACTGGGGCCAGGGAACCCT |
| | | | | GGTCACCGTCTCCTCAG |
| 160 | 386H03 | Amino acid | | QVQLQESGPGLVKPSGTLSLTCAVSGGSISSS |
| | -full | sequence of 386H03 | | DWWSWVRQPPGKGLEWIGEIFHSGNTNYNPS |
| | heavy | heavy chain | | LKSRVTISVDKSKNQISLRLNSVTAADTAVYY |
| | chain | | | CVRDGSGSYWGQGTLVTVSSASTKGPSVFPL |
| | sequence | | | APSSKSTSGGTAALGCLVKDYFPEPVTVSWN |
| | | | | SGALTSGVHTFPAVLQSSGLYSLSSVVTVPSS |
| | | | | SLGTQTYICNVNHKPSNTKVDKKVEPKSCDK |
| | | | | THTCPPCPAPELLGGPSVFLFPPKPKDTLMISR |
| | | | | TPEVTCVVVDVSHEDPEVKFNWYVDGVEVH |
| | | | | NAKTKPREEQYNSTYRVVSVLTVLHQDWLN |
| | | | | GKEYKCKVSNKALPAPIEKTISKAKGQPREPQ |
| | | | | VYTLPPSRDELTKNQVSLTCLVKGFYPSDIAV |
| | | | | EWESNGQPENNYKTTPPVLDSDGSFFLYSKLT |
| | | | | VDKSRWQQGNVFSCSVMHEALHNHYTQKSL |
| | | | | SLSPGK |
| 161 | 386H03 | Nucleic acid | | CAGGTGCAGCTGCAGGAGTCGGGCCCAGG |
| | -full | sequence of 386H03 | | ACTGGTGAAGCCTTCGGGGACCCTGTCCCT |
| | heavy | heavy chain | | CACCTGCGCTGTCTCTGGTGGCTCCATCAGC |
| | chain | | | AGTAGTGACTGGTGGAGTTGGGTCCGCCAG |
| | sequence | | | CCCCCAGGGAAGGGGCTGGAGTGGATTGG |
| | | | | GGAAATCTTTCATAGTGGGAACACCAACTA |
| | | | | CAACCCGTCCCTCAAGAGTCGAGTCACCAT |
| | | | | ATCAGTAGACAAGTCCAAGAACCAGATCTC |
| | | | | CCTGAGGCTGAACTCTGTGACCGCCGCGGA |
| | | | | CACGGCCGTGTATTACTGTGTGAGAGATGG |
| | | | | TTCGGGGAGTTACTGGGGCCAGGGAACCCT |
| | | | | GGTCACCGTCTCCTCAGCCAGCACCAAGGG |
| | | | | CCCCTCTGTGTTCCCTCTGGCCCCTTCCAGC |
| | | | | AAGTCCACCTCTGGCGGAACAGCCGCTCTG |
| | | | | GGCTGCCTCGTGAAGGACTACTTCCCCGAG |
| | | | | CCTGTGACCGTGTCCTGGAACTCTGGCGCT |
| | | | | CTGACCAGCGGAGTGCACACCTTCCCTGCT |
| | | | | GTGCTGCAGTCCTCCGGCCTGTACTCCCTGT |
| | | | | CCTCCGTCGTGACCGTGCCTTCCAGCTCTCT |
| | | | | GGGCACCCAGACCTACATCTGCAACGTGAA |
| | | | | CCACAAGCCCTCCAACACCAAGGTGGACAA |
| | | | | GAAGGTGGAACCCAAGTCCTGCGACAAGA |
| | | | | CCCACACCTGTCCCCCTTGTCCTGCCCCTGA |
| | | | | ACTGCTGGGCGGACCTTCCGTGTTCCTGTTC |
| | | | | CCCCCAAAGCCCAAGGACACCCTGATGATC |
| | | | | TCCCGGACCCCCGAAGTGACCTGCGTGGTG |
| | | | | GTGGATGTGTCCCACGAGGACCCTGAAGTG |
| | | | | AAGTTCAATTGGTACGTGGACGGCGTGGAA |
| | | | | GTGCACAACGCCAAGACCAAGCCTAGAGA |
| | | | | GGAACAGTACAACTCCACCTACCGGGTGGT |
| | | | | GTCCGTGCTGACCGTGCTGCACCAGGATTG |
| | | | | GCTGAACGGCAAAGAGTACAAGTGCAAGG |
| | | | | TGTCCAACAAGGCCCTGCCTGCCCCCATCG |
| | | | | AAAAGACCATCTCCAAGGCCAAGGGCCAG |
| | | | | CCCCGGGAACCCCAGGTGTACACACTGCCC |
| | | | | CCTAGCAGGGACGAGCTGACCAAGAACCA |
| | | | | GGTGTCCCTGACCTGTCTCGTGAAAGGCTT |
| | | | | CTACCCCTCCGATATCGCCGTGGAATGGGA |
| | | | | GTCCAACGGCCAGCCTGAGAACAACTACAA |
| | | | | GACCACCCCCCCTGTGCTGGACTCCGACGG |
| | | | | CTCATTCTTCCTGTACAGCAAGCTGACAGT |
| | | | | GGACAAGTCCCGGTGGCAGCAGGGCAACG |
| | | | | TGTTCTCCTGCTCCGTGATGCACGAGGCCCT |
| | | | | GCACAACCACTACACCCAGAAGTCCCTGTC |
| | | | | CCTGAGCCCCGGCAAG |
| 162 | 386H03 | Amino acid | | QSVLYSSNNKNY |
| | CDRL1 | sequence of CDRL1 | | |
| | (IMGT) | of386H03 using | | |
| | | IMGT | | |
| 163 | 386H03 | Amino acid | | WAS |
| | CDRL2 | sequence of CDRL2 | | |
| | (IMGT) | of386H03 using | | |
| | | IMGT | | |
| 164 | 386H03 | Amino acid | | QQYYSTRS |
| | CDRL3 | sequence of CDRL3 | | |
| | (IMGT) | of386H03 using | | |
| | | IMGT | | |
| 165 | 386H03 | Amino acid | | KSSQSVLYSSNNKNYLA |
| | CDRL1 | sequence of CDRL1 | | |
| | (Kabat) | of386H03 using | | |
| | | Kabat | | |
| 166 | 386H03 | Amino acid | | WASTRES |
| | CDRL2 | sequence of CDRL2 | | |
| | (Kabat) | of386H03 using | | |
| | | Kabat | | |
| 167 | 386H03 | Amino acid | | QQYYSTRS |
| | CDRL3 | sequence of CDRL3 | | |
| | (Kabat) | of386H03 using | | |
| | | Kabat | | |
| 168 | 386H03 | Amino acid | | DIVMTQSPDSLAVSLGERATINCKSSQSVLYS |
| | -Light | sequence of V_{L} of | | SNNKNYLAWYQQKPGQPPKLLIYWASTRESG |
| | chain | 386H03 | | VPDRFSGSGSGTDFTLTISSLQAEDVAVYYCQ |
| | variable | | | QYYSTRSFGQGTKLEIK |
| | region | | | |
| 169 | 386H03 | Nucleic acid | | GACATCGTGATGACCCAGTCTCCAGACTCC |
| | -Light | sequence of V_{L} of | | CTGGCTGTGTCTCTGGGCGAGAGGGCCACC |
| | chain | 386H03 | | ATCAACTGCAAGTCCAGCCAGAGTGTTTTA |
| | variable | | | TACAGCTCCAACAATAAGAACTACTTAGCT |
| | region | | | TGGTACCAGCAGAAACCAGGACAGCCTCCT |
| | | | | AAACTGCTCATTTACTGGGCATCTACCCGG |
| | | | | GAATCCGGGGTCCCTGACCGATTCAGTGGC |
| | | | | AGCGGGTCTGGGACAGATTTCACTCTCACC |
| | | | | ATCAGCAGCCTGCAGGCTGAAGATGTGGCA |
| | | | | gtttattactgtcagcaatattatagtactc |
| | | | | GCAGTTTTGGCCAGGGGACCAAGCTGGAGA |
| | | | | TCAAAC |
| 170 | 386H03 | Amino acid | | DIVMTQSPDSLAVSLGERATINCKSSQSVLYS |
| | -full | sequence of 386H03 | | SNNKNYLAWYQQKPGQPPKLLIYWASTRESG |
| | light | light chain | | VPDRFSGSGSGTDFTLTISSLQAEDVAVYYCQ |
| | chain | | | QYYSTRSFGQGTKLEIKRTVAAPSVFIFPPSDE |
| | sequence | | | QLKSGTASVVCLLNNFYPREAKVQWKVDNA |
| | | | | LQSGNSQESVTEQDSKDSTYSLSSTLTLSKAD |
| | | | | YEKHKVYACEVTHQGLSSPVTKSFNRGEC |
| 171 | 386H03 | Nucleic acid | | GACATCGTGATGACCCAGTCTCCAGACTCC |
| | -full | sequence of 386H03 | | CTGGCTGTGTCTCTGGGCGAGAGGGCCACC |
| | light | light chain | | ATCAACTGCAAGTCCAGCCAGAGTGTTTTA |
| | chain | | | TACAGCTCCAACAATAAGAACTACTTAGCT |
| | sequence | | | TGGTACCAGCAGAAACCAGGACAGCCTCCT |
| | | | | AAACTGCTCATTTACTGGGCATCTACCCGG |
| | | | | GAATCCGGGGTCCCTGACCGATTCAGTGGC |
| | | | | AGCGGGTCTGGGACAGATTTCACTCTCACC |
| | | | | ATCAGCAGCCTGCAGGCTGAAGATGTGGCA |
| | | | | gtttattactgtcagcaatattatagtactc |
| | | | | GCAGTTTTGGCCAGGGGACCAAGCTGGAGA |
| | | | | TCAAACGTACGGTGGCCGCTCCCTCCGTGT |
| | | | | TCATCTTCCCACCTTCCGACGAGCAGCTGA |
| | | | | AGTCCGGCACCGCTTCTGTCGTGTGCCTGCT |
| | | | | GAACAACTTCTACCCCCGCGAGGCCAAGGT |
| | | | | GCAGTGGAAGGTGGACAACGCCCTGCAGTC |
| | | | | CGGCAACTCCCAGGAATCCGTGACCGAGCA |
| | | | | GGACTCCAAGGACAGCACCTACTCCCTGTC |
| | | | | CTCCACCCTGACCCTGTCCAAGGCCGACTA |
| | | | | CGAGAAGCACAAGGTGTACGCCTGCGAAGT |
| | | | | GACCCACCAGGGCCTGTCTAGCCCCGTGAC |
| | | | | CAAGTCTTTCAACCGGGGCGAGTGT |
| 172 | 389A03- | Amino acid | | GGSISSSSYY |
| | CDRH1 | sequence of CDRH1 | | |
| | (IMGT) | of389A03 using | | |
| | | IMGT | | |
| 173 | 389A03- | Amino acid | | IYSTGYT |
| | CDRH2 | sequence of CDRH2 | | |
| | (IMGT) | of389A03 using | | |
| | | IMGT | | |
| 174 | 389A03- | Amino acid | | AISTAAGPEYFHR |
| | CDRH3 | sequence of CDRH3 | | |
| | (IMGT) | of389A03 using | | |
| | | IMGT | | |
| 175 | 389A03- | Amino acid | | SSSYYCG |
| | CDRH1 | sequence of CDRH1 | | |
| | (Kabat) | of389A03 using | | |
| | | Kabat | | |
| 176 | 389A03- | Amino acid | | SIYSTGYTYYNPSLKS |
| | CDRH2 | sequence of CDRH2 | | |
| | (Kabat) | of389A03 using | | |
| | | Kabat | | |
| 177 | 389A03- | Amino acid | | STAAGPEYFHR |
| | CDRH3 | sequence of CDRH3 | | |
| | (Kabat) | of389A03 using | | |
| | | Kabat | | |
| 178 | 389A03 | Amino acid | | QLQESGPGLVKPSETLSLTCTVSGGSISSSSYY |
| | -Heavy | sequence of V_{H} of | | CGWIRQPPGKGLDWIGSIYSTGYTYYNPSLKS |
| | chain | 389A03 | | RVTISIDTSKNQFSCLILTSVTAADTAVYYCAI |
| | variable | | | STAAGPEYFHRWGQGTLVTVSS |
| | region | | | |
| 179 | 389A03 | Nucleic acid | | CAGCTGCAGGAGTCGGGCCCAGGCCTGGTG |
| | -Heavy | sequence of V_{H} of | | AAGCCTTCGGAGACCCTGTCCCTCACCTGC |
| | chain | 389A03 | | ACTGTCTCTGGTGGCTCCATCAGCAGTAGT |
| | variable | | | AGTTATTACTGCGGCTGGATCCGCCAGCCC |
| | region | | | CCTGGGAAGGGGCTGGACTGGATTGGGAGT |
| | | | | ATCTATTCTACTGGGTACACCTACTACAACC |
| | | | | CGTCCCTCAAGAGTCGAGTCACCATTTCCA |
| | | | | TAGACACGTCCAAGAACCAGTTCTCATGCC |
| | | | | TGATACTGACCTCTGTGACCGCCGCAGACA |
| | | | | CGGCTGTGTATTACTGTGCGATAAGTACAG |
| | | | | CAGCTGGCCCTGAATACTTCCATCGCTGGG |
| | | | | GCCAGGGCACCCTGGTCACCGTCTCCTCAG |
| 180 | 389A03 | Amino acid | | QLQESGPGLVKPSETLSLTCTVSGGSISSSSYY |
| | -full | sequence of 389A03 | | CGWIRQPPGKGLDWIGSIYSTGYTYYNPSLKS |
| | heavy | heavy chain | | RVTISIDTSKNQFSCLILTSVTAADTAVYYCAI |
| | chain | | | STAAGPEYFHRWGQGTLVTVSSASTKGPSVF |
| | sequence | | | PLAPSSKSTSGGTAALGCLVKDYFPEPVTVSW |
| | | | | NSGALTSGVHTFPAVLQSSGLYSLSSVVTVPS |
| | | | | SSLGTQTYICNVNHKPSNTKVDKKVEPKSCD |
| | | | | KTHTCPPCPAPELLGGPSVFLFPPKPKDTLMIS |
| | | | | RTPEVTCVVVDVSHEDPEVKFNWYVDGVEV |
| | | | | HNAKTKPREEQYNSTYRVVSVLTVLHQDWL |
| | | | | NGKEYKCKVSNKALPAPIEKTISKAKGQPREP |
| | | | | QVYTLPPSRDELTKNQVSLTCLVKGFYPSDIA |
| | | | | VEWESNGQPENNYKTTPPVLDSDGSFFLYSK |
| | | | | LTVDKSRWQQGNVFSCSVMHEALHNHYTQK |
| | | | | SLSLSPGK |
| 181 | 389A03 | Nucleic acid | | CAGCTGCAGGAGTCGGGCCCAGGCCTGGTG |
| | -full | sequence of 389A03 | | AAGCCTTCGGAGACCCTGTCCCTCACCTGC |
| | heavy | heavy chain | | ACTGTCTCTGGTGGCTCCATCAGCAGTAGT |
| | chain | | | AGTTATTACTGCGGCTGGATCCGCCAGCCC |
| | sequence | | | CCTGGGAAGGGGCTGGACTGGATTGGGAGT |
| | | | | ATCTATTCTACTGGGTACACCTACTACAACC |
| | | | | CGTCCCTCAAGAGTCGAGTCACCATTTCCA |
| | | | | TAGACACGTCCAAGAACCAGTTCTCATGCC |
| | | | | TGATACTGACCTCTGTGACCGCCGCAGACA |
| | | | | CGGCTGTGTATTACTGTGCGATAAGTACAG |
| | | | | CAGCTGGCCCTGAATACTTCCATCGCTGGG |
| | | | | GCCAGGGCACCCTGGTCACCGTCTCCTCAG |
| | | | | CCAGCACCAAGGGCCCCTCTGTGTTCCCTCT |
| | | | | GGCCCCTTCCAGCAAGTCCACCTCTGGCGG |
| | | | | AACAGCCGCTCTGGGCTGCCTCGTGAAGGA |
| | | | | CTACTTCCCCGAGCCTGTGACCGTGTCCTGG |
| | | | | AACTCTGGCGCTCTGACCAGCGGAGTGCAC |
| | | | | ACCTTCCCTGCTGTGCTGCAGTCCTCCGGCC |
| | | | | TGTACTCCCTGTCCTCCGTCGTGACCGTGCC |
| | | | | TTCCAGCTCTCTGGGCACCCAGACCTACAT |
| | | | | CTGCAACGTGAACCACAAGCCCTCCAACAC |
| | | | | CAAGGTGGACAAGAAGGTGGAACCCAAGT |
| | | | | CCTGCGACAAGACCCACACCTGTCCCCCTT |
| | | | | GTCCTGCCCCTGAACTGCTGGGCGGACCTT |
| | | | | CCGTGTTCCTGTTCCCCCCAAAGCCCAAGG |
| | | | | ACACCCTGATGATCTCCCGGACCCCCGAAG |
| | | | | TGACCTGCGTGGTGGTGGATGTGTCCCACG |
| | | | | AGGACCCTGAAGTGAAGTTCAATTGGTACG |
| | | | | TGGACGGCGTGGAAGTGCACAACGCCAAG |
| | | | | ACCAAGCCTAGAGAGGAACAGTACAACTCC |
| | | | | ACCTACCGGGTGGTGTCCGTGCTGACCGTG |
| | | | | CTGCACCAGGATTGGCTGAACGGCAAAGAG |
| | | | | TACAAGTGCAAGGTGTCCAACAAGGCCCTG |
| | | | | CCTGCCCCCATCGAAAAGACCATCTCCAAG |
| | | | | GCCAAGGGCCAGCCCCGGGAACCCCAGGT |
| | | | | GTACACACTGCCCCCTAGCAGGGACGAGCT |
| | | | | GACCAAGAACCAGGTGTCCCTGACCTGTCT |
| | | | | CGTGAAAGGCTTCTACCCCTCCGATATCGC |
| | | | | CGTGGAATGGGAGTCCAACGGCCAGCCTGA |
| | | | | GAACAACTACAAGACCACCCCCCCTGTGCT |
| | | | | GGACTCCGACGGCTCATTCTTCCTGTACAG |
| | | | | CAAGCTGACAGTGGACAAGTCCCGGTGGCA |
| | | | | GCAGGGCAACGTGTTCTCCTGCTCCGTGAT |
| | | | | GCACGAGGCCCTGCACAACCACTACACCCA |
| | | | | GAAGTCCCTGTCCCTGAGCCCCGGCAAG |
| 182 | 389A03- | Amino acid | | QSVLYSSNSKNF |
| | CDRL1 | sequence of CDRL1 | | |
| | (IMGT) | of389A03 using | | |
| | | IMGT | | |
| 183 | 389A03- | Amino acid | | WAS |
| | CDRL2 | sequence of CDRL2 | | |
| | (IMGT) | of389A03 using | | |
| | | IMGT | | |
| 184 | 389A03- | Amino acid | | QQYYSTPRT |
| | CDRL3 | sequence of CDRL3 | | |
| | (IMGT) | of389A03 using | | |
| | | IMGT | | |
| 185 | 389A03- | Amino acid | | KSSQSVLYSSNSKNFLA |
| | CDRL1 | sequence of CDRL1 | | |
| | (Kabat) | of389A03 using | | |
| | | Kabat | | |
| 186 | 389A03- | Amino acid | | WASTRGS |
| | CDRL2 | sequence of CDRL2 | | |
| | (Kabat) | of389A03 using | | |
| | | Kabat | | |
| 187 | 389A03- | Amino acid | | QQYYSTPRT |
| | CDRL3 | sequence of CDRL3 | | |
| | (Kabat) | of389A03 using | | |
| | | Kabat | | |
| 188 | 389A03 | Amino acid | | DIVMTQSPDSLAVSLGERATINCKSSQSVLYS |
| | -Light | sequence of V_{L} of | | SNSKNFLAWYQQKPGQPPKLFIYWASTRGSG |
| | chain | 389A03 | | VPDRISGSGSGTDFNLTISSLQAEDVAVYYCQ |
| | variable | | | QYYSTPRTFGQGTKVEIK |
| | region | | | |
| 189 | 389A03 | Nucleic acid | | GACATCGTGATGACCCAGTCTCCAGACTCC |
| | -Light | sequence of V_{L} of | | CTGGCTGTGTCTCTGGGCGAGAGGGCCACC |
| | chain | 389A03 | | ATCAACTGCAAGTCCAGCCAGAGTGTTTTA |
| | variable | | | TACAGCTCCAACAGTAAGAACTTCTTAGCT |
| | region | | | TGGTACCAGCAGAAACCGGGACAGCCTCCT |
| | | | | AAGCTGTTCATTTACTGGGCATCTACCCGG |
| | | | | GGATCCGGGGTCCCTGACCGAATCAGTGGC |
| | | | | AGCGGGTCTGGGACAGATTTCAATCTCACC |
| | | | | ATCAGCAGCCTGCAGGCTGAAGATGTGGCA |
| | | | | GTTTATTACTGTCAACAATATTATAGTACTC |
| | | | | CTCGGACGTTCGGCCAAGGGACCAAGGTGG |
| | | | | AGATCAAAC |
| 190 | 389A03 | Amino acid | | DIVMTQSPDSLAVSLGERATINCKSSQSVLYS |
| | -full | sequence of 389A03 | | SNSKNFLAWYQQKPGQPPKLFIYWASTRGSG |
| | light | light chain | | VPDRISGSGSGTDFNLTISSLQAEDVAVYYCQ |
| | chain | | | QYYSTPRTFGQGTKVEIKRTVAAPSVFIFPPSD |
| | sequence | | | EQLKSGTASVVCLLNNFYPREAKVQWKVDN |
| | | | | ALQSGNSQESVTEQDSKDSTYSLSSTLTLSKA |
| | | | | DYEKHKVYACEVTHQGLSSPVTKSFNRGEC |
| 191 | 389A03 | Nucleic acid | | GACATCGTGATGACCCAGTCTCCAGACTCC |
| | -full | sequence of 389A03 | | CTGGCTGTGTCTCTGGGCGAGAGGGCCACC |
| | light | light chain | | ATCAACTGCAAGTCCAGCCAGAGTGTTTTA |
| | chain | | | TACAGCTCCAACAGTAAGAACTTCTTAGCT |
| | sequence | | | TGGTACCAGCAGAAACCGGGACAGCCTCCT |
| | | | | AAGCTGTTCATTTACTGGGCATCTACCCGG |
| | | | | GGATCCGGGGTCCCTGACCGAATCAGTGGC |
| | | | | AGCGGGTCTGGGACAGATTTCAATCTCACC |
| | | | | ATCAGCAGCCTGCAGGCTGAAGATGTGGCA |
| | | | | GTTTATTACTGTCAACAATATTATAGTACTC |
| | | | | CTCGGACGTTCGGCCAAGGGACCAAGGTGG |
| | | | | AGATCAAACGTACGGTGGCCGCTCCCTCCG |
| | | | | TGTTCATCTTCCCACCTTCCGACGAGCAGCT |
| | | | | GAAGTCCGGCACCGCTTCTGTCGTGTGCCT |
| | | | | GCTGAACAACTTCTACCCCCGCGAGGCCAA |
| | | | | GGTGCAGTGGAAGGTGGACAACGCCCTGCA |
| | | | | GTCCGGCAACTCCCAGGAATCCGTGACCGA |
| | | | | GCAGGACTCCAAGGACAGCACCTACTCCCT |
| | | | | GTCCTCCACCCTGACCCTGTCCAAGGCCGA |
| | | | | CTACGAGAAGCACAAGGTGTACGCCTGCGA |
| | | | | AGTGACCCACCAGGGCCTGTCTAGCCCCGT |
| | | | | GACCAAGTCTTTCAACCGGGGCGAGTGT |
| 192 | Human | IGHG | Heavy | |
| | heavy | *01 & | Chain | agcacctccgagagcacagccgccctgggctgcctggtcaaggacta |
| | chain | IGHG | Constant | cttccccgaaccggtgacggtgtcgtggaactcaggcgccctgaccag |
| | constant | 4*04 | Region | cggcgtgcacaccttcccggctgtcctacagtcctcaggactctactcc |
| | region #1 | | Nucleotide | ctcagcagcgtggtgaccgtgccctccagcagcttgggcacgaagac |
| | | | Sequence | ctacacctgcaacgtagatcacaagcccagcaacaccaaggtggaca |
| | | | | agagagttgagtccaaatatggtcccccatgcccatcatgcccagcacc |
| | | | | tgagttcctggggggaccatcagtcttcctgttccccccaaaacccaag |
| | | | | gacactctcatgatctcccggacccctgaggtcacgtgcgtggtggtgg |
| | | | | acgtgagccaggaagaccccgaggtccagttcaactggtacgtggat |
| | | | | ggcgtggaggtgcataatgccaagacaaagccgcgggaggagcagt |
| | | | | tcaacagcacgtaccgtgtggtcagcgtcctcaccgtcctgcaccagg |
| | | | | actggctgaacggcaaggagtacaagtgcaaggtctccaacaaaggc |
| | | | | ctcccgtcctccatcgagaaaaccatctccaaagccaaagggcagccc |
| | | | | cgagagccacaggtgtacaccctgcccccatcccaggaggagatgac |
| | | | | caagaaccaggtcagcctgacctgcctggtcaaaggcttctaccccag |
| | | | | cgacatcgccgtggagtgggagagcaatgggcagccggagaacaac |
| | | | | tacaagaccacgcctcccgtgctggactccgacggctccttcttcctcta |
| | | | | cagcaggctaaccgtggacaagagcaggtggcaggaggggaatgtc |
| | | | | ttctcatgctccgtgatgcatgaggctctgcacaaccactacacacaga |
| | | | | agagcctctccctgtctctgggtaaa |
| 193 | IgG4 | | Heavy | ASTKGPSVFPLAPCSRSTSESTAALGCLVKDY |
| | | | Chain | FPEPVTVSWNSGALTSGVHTFPAVLQSSGLYS |
| | | | Constant | LSSVVTVPSSSLGTKTYTCNVDHKPSNTKVD |
| | | | Region | KRVESKYGPPCPSCPAPEFLGGPSVFLFPPKPK |
| | | | Amino Acid | DTLMISRTPEVTCVVVDVSQEDPEVQFNWYV |
| | | | Sequence | DGVEVHNAKTKPREEQFNSTYRVVSVLTVLH |
| | | | | QDWLNGKEYKCKVSNKGLPSSIEKTISKAKG |
| | | | | QPREPQVYTLPPSQEEMTKNQVSLTCLVKGF |
| | | | | YPSDIAVEWESNGQPENNYKTTPPVLDSDGSF |
| | | | | FLYSRLTVDKSRWQEGNVFSCSVMHEALHN |
| | | | | HYTQKSLSLSLGK |
| 194 | Human | IGHG | | Heavy |
| | heavy | *02 | Chain | agcacctccgagagcacagccgccctgggctgcctggtcaaggacta |
| | chain | | Constant | cttccccgaaccggtgacggtgtcgtggaactcaggcgccctgaccag |
| | constant | | Region | cggcgtgcacaccttcccggctgtcctacagtcctcaggactctactcc |
| | region #2 | | Nucleotide | ctcagcagcgtggtgaccgtgccctccagcagcttgggcacgaagac |
| | | | Sequence | ctacacctgcaacgtagatcacaagcccagcaacaccaaggtggaca |
| | | | | agagagttgagtccaaatatggtcccccgtgcccatcatgcccagcac |
| | | | | ctgagttcctggggggaccatcagtcttcctgttccccccaaaacccaa |
| | | | | ggacactctcatgatctcccggacccctgaggtcacgtgcgtggtggtg |
| | | | | gacgtgagccaggaagaccccgaggtccagttcaactggtacgtgga |
| | | | | tggcgtggaggtgcataatgccaagacaaagccgcgggaggagcag |
| | | | | ttcaacagcacgtaccgtgtggtcagcgtcctcaccgtcgtgcaccagg |
| | | | | actggctgaacggcaaggagtacaagtgcaaggtctccaacaaaggc |
| | | | | ctcccgtcctccatcgagaaaaccatctccaaagccaaagggcagccc |
| | | | | cgagagccacaggtgtacaccctgcccccatcccaggaggagatgac |
| | | | | caagaaccaggtcagcctgacctgcctggtcaaaggcttctaccccag |
| | | | | cgacatcgccgtggagtgggagagcaatgggcagccggagaacaac |
| | | | | tacaagaccacgcctcccgtgctggactccgacggctccttcttcctcta |
| | | | | cagcaggctaaccgtggacaagagcaggtggcaggaggggaatgtc |
| | | | | ttctcatgctccgtgatgcatgaggctctgcacaaccactacacgcaga |
| | | | | agagcctctccctgtctctgggtaaa |
| 195 | IgG4 | | Heavy | ASTKGPSVFPLAPCSRSTSESTAALGCLVKDY |
| | | | Chain | FPEPVTVSWNSGALTSGVHTFPAVLQSSGLYS |
| | | | Constant | LSSVVTVPSSSLGTKTYTCNVDHKPSNTKVD |
| | | | Region | KRVESKYGPPCPSCPAPEFLGGPSVFLFPPKPK |
| | | | Amino Acid | DTLMISRTPEVTCVVVDVSQEDPEVQFNWYV |
| | | | Sequence | DGVEVHNAKTKPREEQFNSTYRVVSVLTVVH |
| | | | | QDWLNGKEYKCKVSNKGLPSSIEKTISKAKG |
| | | | | QPREPQVYTLPPSQEEMTKNQVSLTCLVKGF |
| | | | | YPSDIAVEWESNGQPENNYKTTPPVLDSDGSF |
| | | | | FLYSRLTVDKSRWQEGNVFSCSVMHEALHN |
| | | | | HYTQKSLSLSLGK |
| 196 | Human | IGHG | | Heavy |
| | heavy | *03 | Chain | agcacctccgagagcacagccgccctgggctgcctggtcaaggacta |
| | chain | | Constant | cttccccgaaccggtgacggtgtcgtggaactcaggcgccctgaccag |
| | constant | | Region | cggcgtgcacaccttcccggctgtcctacagtcctcaggactctactcc |
| | region #3 | | Nucleotide | ctcagcagcgtggtgaccgtgccctccagcagcttgggcacgaagac |
| | | | Sequence | ctacacctgcaacgtagatcacaagcccagcaacaccaaggtggaca |
| | | | | agagagttgagtccaaatatggtcccccatgcccatcatgcccagcacc |
| | | | | tgagttcctggggggaccatcagtcttcctgttccccccaaaacccaag |
| | | | | gacactctcatgatctcccggacccctgaggtcacgtgcgtggtggtgg |
| | | | | acgtgagccaggaagaccccgaggtccagttcaactggtacgtggat |
| | | | | ggcgtggaggtgcataatgccaagacaaagccgcgggaggagcagt |
| | | | | tcaacagcacgtaccgtgtggtcagcgtcctcaccgtcctgcaccagg |
| | | | | actggctgaacggcaaggagtacaagtgcaaggtctccaacaaaggc |
| | | | | ctcccgtcctccatcgagaaaaccatctccaaagccaaagggcagccc |
| | | | | cgagagccacaggtgtacaccctgcccccatcccaggaggagatgac |
| | | | | caagaaccaggtcagcctgacctgcctggtcaaaggcttctaccccag |
| | | | | cgacatcgccgtggagtgggagagcaatgggcagccggagaacaac |
| | | | | tacaagaccacgcctcccgtgctggactccgacggctccttcttcctcta |
| | | | | cagcaagctcaccgtggacaagagcaggtggcaggaggggaacgtc |
| | | | | ttctcatgctccgtgatgcatgaggctctgcacaaccactacacgcaga |
| | | | | agagcctctccctgtctctgggtaaa |
| 197 | IgG4 | | Heavy | ASTKGPSVFPLAPCSRSTSESTAALGCLVKDY |
| | | | Chain | FPEPVTVSWNSGALTSGVHTFPAVLQSSGLYS |
| | | | Constant | LSSVVTVPSSSLGTKTYTCNVDHKPSNTKVD |
| | | | Region | KRVESKYGPPCPSCPAPEFLGGPSVFLFPPKPK |
| | | | Amino Acid | DTLMISRTPEVTCVVVDVSQEDPEVQFNWYV |
| | | | Sequence | DGVEVHNAKTKPREEQFNSTYRVVSVLTVLH |
| | | | | QDWLNGKEYKCKVSNKGLPSSIEKTISKAKG |
| | | | | QPREPQVYTLPPSQEEMTKNQVSLTCLVKGF |
| | | | | YPSDIAVEWESNGQPENNYKTTPPVLDSDGSF |
| | | | | FLYSKLTVDKSRWQEGNVFSCSVMHEALHN |
| | | | | HYTQKSLSLSLGK |
| 198 | IgG4 | IgG4- | Heavy | |
| | heavy | PE | Chain | agcacctccgagagcacggccgccctgggctgcctggtcaaggacta |
| | chain | | Constant | cttccccgaaccagtgacggtgtcgtggaactcaggcgccctgaccag |
| | constant | | Region | cggcgtgcacaccttcccggctgtcctacagtcctcaggactctactcc |
| | region- | | Nucleotide | ctcagcagcgtggtgaccgtgccctccagcagcttgggcacgaagac |
| | IgG4-PE | | Sequence- | ctacacctgcaacgtagatcacaagcccagcaacaccaaggtggaca |
| | | | Synthetic | agagagttgagtccaaatatggtcccccatgcccaccatgcccagcgc |
| | | | Version A | ctgaatttgaggggggaccatcagtcttcctgttccccccaaaacccaa |
| | | | | ggacactctcatgatctcccggacccctgaggtcacgtgcgtggtggtg |
| | | | | gacgtgagccaggaagaccccgaggtccagttcaactggtacgtgga |
| | | | | tggcgtggaggtgcataatgccaagacaaagccgcgggaggagcag |
| | | | | ttcaacagcacgtaccgtgtggtcagcgtcctcaccgtcctgcaccagg |
| | | | | actggctgaacggcaaggagtacaagtgcaaggtctccaacaaaggc |
| | | | | ctcccgtcatcgatcgagaaaaccatctccaaagccaaagggcagccc |
| | | | | cgagagccacaggtgtacaccctgcccccatcccaggaggagatgac |
| | | | | caagaaccaggtcagcctgacctgcctggtcaaaggcttctaccccag |
| | | | | cgacatcgccgtggagtgggagagcaatgggcagccggagaacaac |
| | | | | tacaagaccacgcctcccgtgctggactccgacggatccttcttcctcta |
| | | | | cagcaggctaaccgtggacaagagcaggtggcaggaggggaatgtc |
| | | | | ttctcatgctccgtgatgcatgaggctctgcacaaccactacacacaga |
| | | | | agagcctctccctgtctctgggtaaa |
| 199 | IgG4 | | Heavy | ASTKGPSVFPLAPCSRSTSESTAALGCLVKDY |
| | heavy | | Chain | FPEPVTVSWNSGALTSGVHTFPAVLQSSGLYS |
| | chain | | Constant | LSSVVTVPSSSLGTKTYTCNVDHKPSNTKVD |
| | constant | | Region | KRVESKYGPPCPPCPAPEFEGGPSVFLFPPKPK |
| | region- | | Amino Acid | DTLMISRTPEVTCVVVDVSQEDPEVQFNWYV |
| | IgG4-PE | | Sequence- | DGVEVHNAKTKPREEQFNSTYRVVSVLTVLH |
| | | | Encoded by | QDWLNGKEYKCKVSNKGLPSSIEKTISKAKG |
| | | | Synthetic | QPREPQVYTLPPSQEEMTKNQVSLTCLVKGF |
| | | | Version A, | YPSDIAVEWESNGQPENNYKTTPPVLDSDGSF |
| | | | B & C(Two | FLYSRLTVDKSRWQEGNVFSCSVMHEALHN |
| | | | residues | HYTQKSLSLSLGK |
| | | | that differ | |
| | | | from the | |
| | | | wild-type | |
| | | | sequence | |
| | | | are | |
| | | | identified in | |
| | | | bold) | |
| 200 | IgG4 | | Heavy | |
| | heavy | | Chain | ccacaagcgagtccaccgctgccctcggctgtctggtgaaagactactt |
| | chain | | Constant | tcccgagcccgtgaccgtctcctggaatagcggagccctgacctccgg |
| | constant | | Region | cgtgcacacatttcccgccgtgctgcagagcagcggactgtatagcct |
| | region- | | Nucleotide | gagcagcgtggtgaccgtgcccagctccagcctcggcaccaaaacct |
| | IgG4-PE | | Sequence- | acacctgcaacgtggaccacaagccctccaacaccaaggtggacaag |
| | | | Synthetic | cgggtggagagcaagtacggccccccttgccctccttgtcctgcccct |
| | | | Version B | gagttcgagggaggaccctccgtgttcctgtttccccccaaacccaagg |
| | | | | acaccctgatgatctcccggacacccgaggtgacctgtgtggtcgtgg |
| | | | | acgtcagccaggaggaccccgaggtgcagttcaactggtatgtggac |
| | | | | ggcgtggaggtgcacaatgccaaaaccaagcccagggaggagcagt |
| | | | | tcaattccacctacagggtggtgagcgtgctgaccgtcctgcatcagga |
| | | | | ttggctgaacggcaaggagtacaagtgcaaggtgtccaacaagggac |
| | | | | tgcccagctccatcgagaagaccatcagcaaggctaagggccagccg |
| | | | | agggagccccaggtgtataccctgcctcctagccaggaagagatgac |
| | | | | caagaaccaagtgtccctgacctgcctggtgaagggattctacccctcc |
| | | | | gacatcgccgtggagtgggagagcaatggccagcccgagaacaact |
| | | | | acaaaacaacccctcccgtgctcgatagcgacggcagcttctttctctac |
| | | | | agccggctgacagtggacaagagcaggtggcaggagggcaacgtgt |
| | | | | tctcctgttccgtgatgcacgaggccctgcacaatcactacacccagaa |
| | | | | gagcctctccctgtccctgggcaag |
| 201 | IgG4 | | Heavy | gccagcaccaagggcccttccgtgttccccctggccccttgcagcagg |
| | heavy | | Chain | agcacctccgaatccacagctgccctgggctgtctggtgaaggactact |
| | chain | | Constant | ttcccgagcccgtgaccgtgagctggaacagcggcgctctgacatccg |
| | constant | | Region | gcgtccacacctttcctgccgtcctgcagtcctccggcctctactccctgt |
| | region- | | Nucleotide | cctccgtggtgaccgtgcctagctcctccctcggcaccaagacctacac |
| | IgG4-PE | | Sequence- | ctgtaacgtggaccacaaaccctccaacaccaaggtggacaaacggg |
| | | | Synthetic | tcgagagcaagtacggccctccctgccctccttgtcctgcccccgagtt |
| | | | Version C | cgaaggcggacccagcgtgttcctgttccctcctaagcccaaggacac |
| | | | | cctcatgatcagccggacacccgaggtgacctgcgtggtggtggatgt |
| | | | | gagccaggaggaccctgaggtccagttcaactggtatgtggatggcgt |
| | | | | ggaggtgcacaacgccaagacaaagccccgggaagagcagttcaac |
| | | | | tccacctacagggtggtcagcgtgctgaccgtgctgcatcaggactgg |
| | | | | ctgaacggcaaggagtacaagtgcaaggtcagcaataagggactgcc |
| | | | | cagcagcatcgagaagaccatctccaaggctaaaggccagccccgg |
| | | | | gaacctcaggtgtacaccctgcctcccagccaggaggagatgaccaa |
| | | | | gaaccaggtgagcctgacctgcctggtgaagggattctacccttccga |
| | | | | catcgccgtggagtgggagtccaacggccagcccgagaacaattata |
| | | | | agaccacccctcccgtcctcgacagcgacggatccttctttctgtactcc |
| | | | | aggctgaccgtggataagtccaggtggcaggaaggcaacgtgttcag |
| | | | | ctgctccgtgatgcacgaggccctgcacaatcactacacccagaagtc |
| | | | | cctgagcctgtccctgggaaag |
| 202 | IgG4 | | Heavy | |
| | chain | | Chain | agcacctccgagagcacggccgccctgggctgcctggtcaaggacta |
| | constant | | Constant | cttccccgaaccagtgacggtgtcgtggaactcaggcgccctgaccag |
| | region | | Region | cggcgtgcacaccttcccggctgtcctacagtcctcaggactctactcc |
| | | | Nucleotide | ctcagcagcgtggtgaccgtgccctccagcagcttgggcacgaagac |
| | | | Sequence- | ctacacctgcaacgtagatcacaagcccagcaacaccaaggtggaca |
| | | | Synthetic | agagagttgagtccaaatatggtcccccatgcccaccatgcccagcgc |
| | | | Version D | ctccagttgcggggggaccatcagtcttcctgttccccccaaaacccaa |
| | | | | ggacactctcatgatctcccggacccctgaggtcacgtgcgtggtggtg |
| | | | | gacgtgagccaggaagaccccgaggtccagttcaactggtacgtgga |
| | | | | tggcgtggaggtgcataatgccaagacaaagccgcgggaggagcag |
| | | | | ttcaacagcacgtaccgtgtggtcagcgtcctcaccgtcctgcaccagg |
| | | | | actggctgaacggcaaggagtacaagtgcaaggtctccaacaaaggc |
| | | | | ctcccgtcatcgatcgagaaaaccatctccaaagccaaagggcagccc |
| | | | | cgagagccacaggtgtacaccctgcccccatcccaggaggagatgac |
| | | | | caagaaccaggtcagcctgacctgcctggtcaaaggcttctaccccag |
| | | | | cgacatcgccgtggagtgggagagcaatgggcagccggagaacaac |
| | | | | tacaagaccacgcctcccgtgctggactccgacggatccttcttcctcta |
| | | | | cagcaggctaaccgtggacaagagcaggtggcaggaggggaatgtc |
| | | | | ttctcatgctccgtgatgcatgaggctctgcacaaccactacacacaga |
| | | | | agagcctctccctgtctctgggtaaa |
| 203 | heavy | | Heavy | ASTKGPSVFPLAPCSRSTSESTAALGCLVKDY |
| | | | Chain | FPEPVTVSWNSGALTSGVHTFPAVLQSSGLYS |
| | | | Constant | LSSVVTVPSSSLGTKTYTCNVDHKPSNTKVD |
| | | | Region | KRVESKYGPPCPPCPAPPVAGGPSVFLFPPKP |
| | | | Amino Acid | KDTLMISRTPEVTCVVVDVSQEDPEVQFNWY |
| | | | Sequence- | VDGVEVHNAKTKPREEQFNSTYRVVSVLTVL |
| | | | Encoded by | HQDWLNGKEYKCKVSNKGLPSSIEKTISKAK |
| | | | Synthetic | GQPREPQVYTLPPSQEEMTKNQVSLTCLVKG |
| | | | Version D | FYPSDIAVEWESNGQPENNYKTTPPVLDSDGS |
| | | | | FFLYSRLTVDKSRWQEGNVFSCSVMHEALHN |
| | | | | HYTQKSLSLSLGK |
| 204 | Disabled | Disabled | Heavy | |
| | Human | IGHG | Chain | agcacctctgggggcacagcggccctgggctgcctggtcaaggacta |
| | IgG1 | 1 | Constant | cttccccgaaccggtgacggtgtcgtggaactcaggcgccctgaccag |
| | heavy | | Region | cggcgtgcacaccttcccggctgtcctacagtcctcaggactctactcc |
| | chain | | Nucleotide | ctcagcagcgtggtgaccgtgccctccagcagcttgggcacccagac |
| | constant | | Sequence | ctacatctgcaacgtgaatcacaagcccagcaacaccaaggtggacaa |
| | region | | | gaaagtggagcccaaatcttgtgacaaaactcacacatgcccaccgtg |
| | | | | cccagcacctgaactcgcgggggcaccgtcagtcttcctcttcccccca |
| | | | | aaacccaaggacaccctcatgatctcccggacccctgaggtcacatgc |
| | | | | gtggtggtggacgtgagccacgaagaccctgaggtcaagttcaactgg |
| | | | | tacgtggacggcgtggaggtgcataatgccaagacaaagccgcggg |
| | | | | aggagcagtacaacagcacgtaccgtgtggtcagcgtcctcaccgtcc |
| | | | | tgcaccaggactggctgaatggcaaggagtacaagtgcaaggtctcca |
| | | | | acaaagccctcccagcccccatcgagaaaaccatctccaaagccaaa |
| | | | | gggcagccccgagaaccacaggtgtacaccctgcccccatcccggg |
| | | | | atgagctgaccaagaaccaggtcagcctgacctgcctggtcaaaggct |
| | | | | tctatcccagcgacatcgccgtggagtgggagagcaatgggcagccg |
| | | | | gagaacaactacaagaccacgcctcccgtgctggactccgacggctc |
| | | | | cttcttcctctacagcaagctcaccgtggacaagagcaggtggcagca |
| | | | | ggggaacgtcttctcatgctccgtgatgcatgaggctctgcacaaccac |
| | | | | tacacgcagaagagcctctccctgtctccgggtaaa |
| 205 | | | Heavy | ASTKGPSVFPLAPSSKSTSGGTAALGCLVKDY |
| | | | Chain | FPEPVTVSWNSGALTSGVHTFPAVLQSSGLYS |
| | | | Constant | LSSVVTVPSSSLGTQTYICNVNHKPSNTKVDK |
| | | | Region | KVEPKSCDKTHTCPPCPAPELAGAPSVFLFPP |
| | | | Amino Acid | KPKDTLMISRTPEVTCVVVDVSHEDPEVKFN |
| | | | Sequence | WYVDGVEVHNAKTKPREEQYNSTYRVVSVL |
| | | | (Two | TVLHQDWLNGKEYKCKVSNKALPAPIEKTIS |
| | | | residues | KAKGQPREPQVYTLPPSRDELTKNQVSLTCL |
| | | | that differ | VKGFYPSDIAVEWESNGQPENNYKTTPPVLD |
| | | | from the | SDGSFFLYSKLTVDKSRWQQGNVFSCSVMHE |
| | | | wild-type | ALHNHYTQKSLSLSPGK |
| | | | sequence | |
| | | | are | |
| | | | identified in | |
| | | | bold) | |
| 206 | Human | IGKC | Cκ Light | cgtacggtggccgctccctccgtgttcatcttcccaccttccgacgagca |
| | Cκ | *01 | Chain | gctgaagtccggcaccgcttctgtcgtgtgcctgctgaacaacttctacc |
| | constant | | Constant | cccgcgaggccaaggtgcagtggaaggtggacaacgccctgcagtc |
| | region | | Region | cggcaactcccaggaatccgtgaccgagcaggactccaaggacagc |
| | | | Nucleotide | acctactccctgtcctccaccctgaccctgtccaaggccgactacgaga |
| | | | Sequence | agcacaaggtgtacgcctgcgaagtgacccaccagggcctgtctagc |
| | | | | cccgtgaccaagtctttcaaccggggcgagtgt |
| 207 | | | Cκ Light | |
| | | | Chain | YPREAKVQWKVDNALQSGNSQESVTEQDSK |
| | | | Constant | DSTYSLSSTLTLSKADYEKHKVYACEVTHQG |
| | | | Region | LSSPVTKSFNRGEC |
| | | | Amino Acid | |
| | | | Sequence | |
| 208 | Human Cκ | IGKC | Cκ Light | cgaactgtggctgcaccatctgtcttcatcttcccgccatctgatgagca |
| | constant | *02 | Chain | gttgaaatctggaactgcctctgttgtgtgcctgctgaataacttctatccc |
| | region | | Constant | agagaggccaaagtacagtggaaggtggataacgccctccaatcggg |
| | | | Region | taactcccaggagagtgtcacagagcaggagagcaaggacagcacct |
| | | | Nucleotide | acagcctcagcagcaccctgacgctgagcaaagcagactacgagaaa |
| | | | Sequence | cacaaagtctacgccggcgaagtcacccatcagggcctgagctcgcc |
| | | | | cgtcacaaagagcttcaacaggggagagtgt |
| 209 | | | Cκ Light | RTVAAPSVFIFPPSDEQLKSGTASVVCLLNNF |
| | | | Chain | YPREAKVQWKVDNALQSGNSQESVTEQESK |
| | | | Constant | DSTYSLSSTLTLSKADYEKHKVYAGEVTHQG |
| | | | Region | LSSPVTKSFNRGEC |
| | | | Amino Acid | |
| | | | Sequence | |
| 210 | Human Cκ | IGKC | Cκ Light | cgaactgtggctgcaccatctgtcttcatcttcccgccatctgatgagca |
| | constant | *03 | Chain | gttgaaatctggaactgcctctgttgtgtgcctgctgaataacttctatccc |
| | region | | Constant | agagaggccaaagtacagcggaaggtggataacgccctccaatcgg |
| | | | Region | gtaactcccaggagagtgtcacagagcaggagagcaaggacagcac |
| | | | Nucleotide | ctacagcctcagcagcaccctgacgctgagcaaagcagactacgaga |
| | | | Sequence | aacacaaagtctacgcctgcgaagtcacccatcagggcctgagctcgc |
| | | | | ccgtcacaaagagcttcaacaggggagagtgt |
| 211 | | | Cκ Light | RTVAAPSVFIFPPSDEQLKSGTASVVCLLNNF |
| | | | Chain | YPREAKVQRKVDNALQSGNSQESVTEQESKD |
| | | | Constant | STYSLSSTLTLSKADYEKHKVYACEVTHQGL |
| | | | Region | SSPVTKSFNRGEC |
| | | | Amino Acid | |
| | | | Sequence | |
| 212 | Human Cκ | IGKC | Cκ Light | cgaactgtggctgcaccatctgtcttcatcttcccgccatctgatgagca |
| | constant | *04 | Chain | gttgaaatctggaactgcctctgttgtgtgcctgctgaataacttctatccc |
| | region | | Constant | agagaggccaaagtacagtggaaggtggataacgccctccaatcggg |
| | | | Region | taactcccaggagagtgtcacagagcaggacagcaaggacagcacct |
| | | | Nucleotide | acagcctcagcagcaccctgacgctgagcaaagcagactacgagaaa |
| | | | Sequence | cacaaactctacgcctgcgaagtcacccatcagggcctgagctcgccc |
| | | | | gtcacaaagagcttcaacaggggagagtgt |
| 213 | | | Cκ Light | RTVAAPSVFIFPPSDEQLKSGTASVVCLLNNF |
| | | | Chain | YPREAKVQWKVDNALQSGNSQESVTEQDSK |
| | | | Constant | DSTYSLSSTLTLSKADYEKHKLYACEVTHQG |
| | | | Region | LSSPVTKSFNRGEC |
| | | | Amino Acid | |
| | | | Sequence | |
| 214 | Human Cκ | IGKC | Cκ Light | |
| | constant | *05 | Chain | gttgaaatctggaactgcctctgttgtgtgcctgctgaataacttctatccc |
| | region | | Constant | agagaggccaaagtacagtggaaggtggataacgccctccaatcggg |
| | | | Region | taactcccaggagagtgtcacagagcaggacagcaaggacagcacct |
| | | | Nucleotide | acagcctcagcaacaccctgacgctgagcaaagcagactacgagaaa |
| | | | Sequence | cacaaagtctacgcctgcgaagtcacccatcagggcctgagctcgccc |
| | | | | gtcacaaagagcttcaacaggggagagtgc |
| 215 | Ck | | Cκ Light | RTVAAPSVFIFPPSDEQLKSGTASVVCLLNNF |
| | | | Chain | YPREAKVQWKVDNALQSGNSQESVTEQDSK |
| | | | Constant | DSTYSLSNTLTLSKADYEKHKVYACEVTHQG |
| | | | Region | LSSPVTKSFNRGEC |
| | | | Amino Acid | |
| | | | Sequence | |
| 216 | Human Cλ | IGCλ | Cλ Light | cccaaggccaaccccacggtcactctgttcccgccctcctctgaggag |
| | constant | 1*01 | Chain | ctccaagccaacaaggccacactagtgtgtctgatcagtgacttctacc |
| | region | | Constant | cgggagctgtgacagtggcttggaaggcagatggcagccccgtcaag |
| | | | Region | gcgggagtggagacgaccaaaccctccaaacagagcaacaacaagt |
| | | | Nucleotide | acgcggccagcagctacctgagcctgacgcccgagcagtggaagtc |
| | | | Sequence | ccacagaagctacagctgccaggtcacgcatgaagggagcaccgtg |
| | | | | gagaagacagtggcccctacagaatgttca |
| 217 | | | Cλ Light | PKANPTVTLFPPSSEELQANKATLVCLISDFYP |
| | | | Chain | GAVTVAWKADGSPVKAGVETTKPSKQSNNK |
| | | | Constant | YAASSYLSLTPEQWKSHRSYSCQVTHEGSTV |
| | | | Region | EKTVAPTECS |
| | | | Amino Acid | |
| | | | Sequence | |
| 218 | Human Cλ | IGCλ | Cλ Light | ggtcagcccaaggccaaccccactgtcactctgttcccgccctcctctg |
| | constant | 1*02 | Chain | aggagctccaagccaacaaggccacactagtgtgtctgatcagtgactt |
| | region | | Constant | ctacccgggagctgtgacagtggcctggaaggcagatggcagcccc |
| | | | Region | gtcaaggcgggagtggagaccaccaaaccctccaaacagagcaaca |
| | | | Nucleotide | acaagtacgcggccagcagctacctgagcctgacgcccgagcagtg |
| | | | Sequence | gaagtcccacagaagctacagctgccaggtcacgcatgaagggagca |
| | | | | ccgtggagaagacagtggcccctacagaatgttca |
| 219 | | | Cλ Light | GQPKANPTVTLFPPSSEELQANKATLVCLISD |
| | | | Chain | FYPGAVTVAWKADGSPVKAGVETTKPSKQS |
| | | | Constant | NNKYAASSYLSLTPEQWKSHRSYSCQVTHEG |
| | | | Region | STVEKTVAPTECS |
| | | | Amino Acid | |
| | | | Sequence | |
| 220 | Human Cλ | IGCλ | Cλ Light | |
| | constant | 2*01 | Chain | aggagctccaagccaacaaggccacactagtgtgtctgatcagtgactt |
| | region | | Constant | ctacccgggagctgtgacagtggcctggaaggcagatggcagcccc |
| | | | Region | gtcaaggcgggagtggagaccaccaaaccctccaaacagagcaaca |
| | | | Nucleotide | acaagtacgcggccagcagctacctgagcctgacgcccgagcagtg |
| | | | Sequence- | gaagtcccacagaagctacagctgccaggtcacgcatgaagggagca |
| | | | Version A | ccgtggagaagacagtggcccctacagaatgttca |
| 221 | | | Cλ Light | ggccagcctaaggccgctccttctgtgaccctgttccccccatcctccg |
| | | | Chain | aggaactgcaggctaacaaggccaccctcgtgtgcctgatcagcgact |
| | | | Constant | tctaccctggcgccgtgaccgtggcctggaaggctgatagctctcctgt |
| | | | Region | gaaggccggcgtggaaaccaccaccccttccaagcagtccaacaaca |
| | | | Nucleotide | aatacgccgcctcctcctacctgtccctgacccctgagcagtggaagtc |
| | | | Sequence- | ccaccggtcctacagctgccaagtgacccacgagggctccaccgtgg |
| | | | Version B | aaaagaccgtggctcctaccgagtgctcc |
| 222 | | | Cλ Light | ggccagcctaaagctgcccccagcgtcaccctgtttcctccctccagcg |
| | | | Chain | aggagctccaggccaacaaggccaccctcgtgtgcctgatctccgact |
| | | | Constant | tctatcccggcgctgtgaccgtggcttggaaagccgactccagccctgt |
| | | | Region | caaagccggcgtggagaccaccacaccctccaagcagtccaacaac |
| | | | Nucleotide | aagtacgccgcctccagctatctctccctgacccctgagcagtggaagt |
| | | | Sequence- | cccaccggtcctactcctgtcaggtgacccacgagggctccaccgtgg |
| | | | Version C | aaaagaccgtcgcccccaccgagtgctcc |
| 223 | | | Cλ Light | GQPKANPTVTLFPPSSEELQANKATLVCLISD |
| | | | Chain | FYPGAVTVAWKADGSPVKAGVETTKPSKQS |
| | | | Constant | NNKYAASSYLSLTPEQWKSHRSYSCQVTHEG |
| | | | Region | STVEKTVAPTECS |
| | | | Amino Acid | |
| | | | Sequence- | |
| | | | Encoded by | |
| | | | Version A, | |
| | | | B&C | |
| 224 | Human Cλ | IGCλ | Cλ Light | ggtcagcccaaggctgccccctcggtcactctgttcccgccctcctctg |
| | constant | 2*02 & | Chain | aggagcttcaagccaacaaggccacactggtgtgtctcataagtgactt |
| | region | IGLC | Constant | ctacccgggagccgtgacagtggcctggaaggcagatagcagcccc |
| | | 2*03 | Region | gtcaaggcgggagtggagaccaccacaccctccaaacaaagcaaca |
| | | | Nucleotide | acaagtacgcggccagcagctatctgagcctgacgcctgagcagtgg |
| | | | Sequence | aagtcccacagaagctacagctgccaggtcacgcatgaagggagcac |
| | | | | cgtggagaagacagtggcccctacagaatgttca |
| 225 | | | Cλ Light | GQPKAAPSVTLFPPSSEELQANKATLVCLISDF |
| | | | Chain | YPGAVTVAWKADSSPVKAGVETTTPSKQSN |
| | | | Constant | NKYAASSYLSLTPEQWKSHRSYSCQVTHEGS |
| | | | Region | TVEKTVAPTECS |
| | | | Amino Acid | |
| | | | Sequence | |
| 226 | Human Cλ | IGCλ | Cλ Light | |
| | constant | 3*01 | Chain | ttcaagccaacaaggccacactggtgtgtctcataagtgacttctacccg |
| | region | | Constant | ggagccgtgacagttgcctggaaggcagatagcagccccgtcaaggc |
| | | | Region | gggggtggagaccaccacaccctccaaacaaagcaacaacaagtac |
| | | | Nucleotide | gcggccagcagctacctgagcctgacgcctgagcagtggaagtccca |
| | | | Sequence | caaaagctacagctgccaggtcacgcatgaagggagcaccgtggag |
| | | | | aagacagttgcccctacggaatgttca |
| 227 | | | Cλ Light | PKAAPSVTLFPPSSEELQANKATLVCLISDFYP |
| | | | Chain | GAVTVAWKADSSPVKAGVETTTPSKQSNNK |
| | | | Constant | YAASSYLSLTPEQWKSHKSYSCQVTHEGSTV |
| | | | Region | EKTVAPTECS |
| | | | Amino Acid | |
| | | | Sequence | |
| 228 | Human Cλ | IGCλ | Cλ Light | ggtcagcccaaggctgccccctcggtcactctgttcccaccctcctctg |
| | constant | 3*02 | Chain | aggagcttcaagccaacaaggccacactggtgtgtctcataagtgactt |
| | region | | Constant | ctacccggggccagtgacagttgcctggaaggcagatagcagccccg |
| | | | Region | tcaaggcgggggtggagaccaccacaccctccaaacaaagcaacaa |
| | | | Nucleotide | caagtacgcggccagcagctacctgagcctgacgcctgagcagtgga |
| | | | Sequence | agtcccacaaaagctacagctgccaggtcacgcatgaagggagcacc |
| | | | | gtggagaagacagtggcccctacggaatgttca |
| 229 | | | Cλ Light | GQPKAAPSVTLFPPSSEELQANKATLVCLISDF |
| | | | Chain | YPGPVTVAWKADSSPVKAGVETTTPSKQSNN |
| | | | Constant | KYAASSYLSLTPEQWKSHKSYSCQVTHEGST |
| | | | Region | VEKTVAPTECS |
| | | | Amino Acid | |
| | | | Sequence | |
| 230 | Human Cλ | IGCλ | Cλ Light | ggtcagcccaaggctgccccctcggtcactctgttcccaccctcctctg |
| | constant | 3*03 | Chain | aggagcttcaagccaacaaggccacactggtgtgtctcataagtgactt |
| | region | | Constant | ctacccgggagccgtgacagtggcctggaaggcagatagcagcccc |
| | | | Region | gtcaaggcgggagtggagaccaccacaccctccaaacaaagcaaca |
| | | | Nucleotide | acaagtacgcggccagcagctacctgagcctgacgcctgagcagtgg |
| | | | Sequence | aagtcccacaaaagctacagctgccaggtcacgcatgaagggagcac |
| | | | | cgtggagaagacagtggcccctacagaatgttca |
| 231 | | | Cλ Light | GQPKAAPSVTLFPPSSEELQANKATLVCLISDF |
| | | | Chain | YPGAVTVAWKADSSPVKAGVETTTPSKQSN |
| | | | Constant | NKYAASSYLSLTPEQWKSHKSYSCQVTHEGS |
| | | | Region | TVEKTVAPTECS |
| | | | Amino Acid | |
| | | | Sequence | |
| 232 | Human Cλ | IGCλ | Cλ Light | |
| | constant | 3*04 | Chain | aggagcttcaagccaacaaggccacactggtgtgtctcataagtgactt |
| | region | | Constant | ctacccgggagccgtgacagtggcctggaaggcagatagcagcccc |
| | | | Region | gtcaaggcgggagtggagaccaccacaccctccaaacaaagcaaca |
| | | | Nucleotide | acaagtacgcggccagcagctacctgagcctgacgcctgagcagtgg |
| | | | Sequence | aagtcccacagaagctacagctgccaggtcacgcatgaagggagcac |
| | | | | cgtggagaagacagtggcccctacagaatgttca |
| 233 | | | Cλ Light | GQPKAAPSVTLFPPSSEELQANKATLVCLISDF |
| | | | Chain | YPGAVTVAWKADSSPVKAGVETTTPSKQSN |
| | | | Constant | NKYAASSYLSLTPEQWKSHRSYSCQVTHEGS |
| | | | Region | TVEKTVAPTECS |
| | | | Amino Acid | |
| | | | Sequence | |
| 234 | Human Cλ | IGCλ | Cλ Light | ggtcagcccaaggctgccccatcggtcactctgttcccgccctcctctg |
| | constant | 6*01 | Chain | aggagcttcaagccaacaaggccacactggtgtgcctgatcagtgactt |
| | region | | Constant | ctacccgggagctgtgaaagtggcctggaaggcagatggcagcccc |
| | | | Region | gtcaacacgggagtggagaccaccacaccctccaaacagagcaaca |
| | | | Nucleotide | acaagtacgcggccagcagctacctgagcctgacgcctgagcagtgg |
| | | | Sequence | aagtcccacagaagctacagctgccaggtcacgcatgaagggagcac |
| | | | | cgtggagaagacagtggcccctgcagaatgttca |
| 235 | | | Cλ Light | GQPKAAPSVTLFPPSSEELQANKATLVCLISDF |
| | | | Chain | YPGAVKVAWKADGSPVNTGVETTTPSKQSN |
| | | | Constant | NKYAASSYLSLTPEQWKSHRSYSCQVTHEGS |
| | | | Region | TVEKTVAPAECS |
| | | | Amino Acid | |
| | | | Sequence | |
| 236 | Human Cλ | IGLC | Cλ Light | ggtcagcccaaggctgccccatcggtcactctgttcccaccctcctctg |
| | constant | 7*01 & | Chain | aggagcttcaagccaacaaggccacactggtgtgtctcgtaagtgactt |
| | region | IGCλ | Constant | ctacccgggagccgtgacagtggcctggaaggcagatggcagcccc |
| | | 7*02 | Region | gtcaaggtgggagtggagaccaccaaaccctccaaacaaagcaacaa |
| | | | Nucleotide | caagtatgcggccagcagctacctgagcctgacgcccgagcagtgga |
| | | | Sequence | agtcccacagaagctacagctgccgggtcacgcatgaagggagcacc |
| | | | | gtggagaagacagtggcccctgcagaatgctct |
| 237 | | | Cλ Light | GQPKAAPSVTLFPPSSEELQANKATLVCLVSD |
| | | | Chain | FYPGAVTVAWKADGSPVKVGVETTKPSKQS |
| | | | Constant | NNKYAASSYLSLTPEQWKSHRSYSCRVTHEG |
| | | | Region | STVEKTVAPAECS |
| | | | Amino Acid | |
| | | | Sequence | |
| 238 | 413G05 | Amino acid | | |
| | CDRH1 | sequence of CDRH1 | | |
| | (IMGT) | of 413G05 using | | |
| | | IMGT | | |
| 239 | 413G05 | Amino acid | | ISTSGSTI |
| | CDRH2 | sequence of CDRH2 | | |
| | (IMGT) | of 413G05 using | | |
| | | IMGT | | |
| 240 | 413G05 | Amino acid | | ARGITGTNFYHYGLGV |
| | CDRH3 | sequence of CDRH3 | | |
| | (IMGT) | of 413G05 using | | |
| | | IMGT | | |
| 241 | 413G05 | Amino acid | | DYYMS |
| | CDRH1 | sequence of CDRH1 | | |
| | (Kabat) | of 413G05 using | | |
| | | Kabat | | |
| 242 | 413G05 | Amino acid | | YISTSGSTIYYADSVKG |
| | CDRH2 | sequence of CDRH2 | | |
| | (Kabat) | of 413G05 using | | |
| | | Kabat | | |
| 243 | 413G05 | Amino acid | | GITGTNFYHYGLGV |
| | CDRH3 | sequence of CDRH3 | | |
| | (Kabat) | of 413G05 using | | |
| | | Kabat | | |
| 244 | 413G05 | Amino acid | | QVQLVESGGGLVKPGGSLRLSCAASGFTFSD |
| | -Heavy | sequence of V_{H} of | | YYMSWIRQVPGKGLEWVSYISTSGSTIYYAD |
| | chain | 413G05 | | SVKGRFTISRDNAKNSLYLQMNSLRAEDAAV |
| | variable | | | YHCARGITGTNFYHYGLGVWGQGTTVTVSS |
| | region | | | |
| 245 | 413G05 | Nucleic acid | | CAGGTGCAGCTGGTGGAGTCTGGGGGAGGC |
| | -Heavy | sequence of V_{H} of | | TTGGTCAAGCCTGGAGGGTCCCTGAGACTC |
| | chain | 413G05 | | TCCTGTGCAGCCTCTGGATTCACCTTCAGTG |
| | variable | | | ACTACTACATGAGCTGGATCCGCCAGGTTC |
| | region | | | CAGGGAAGGGGCTGGAGTGGGTTTCATACA |
| | | | | TTAGTACTAGTGGTAGTACCATATACTACG |
| | | | | CAGACTCTGTGAAGGGCCGATTCACCATCT |
| | | | | CCAGGGACAACGCCAAGAACTCACTGTATC |
| | | | | TACAAATGAACAGCCTGAGAGCCGAGGAC |
| | | | | GCGGCCGTGTATCACTGTGCGAGAGGTATA |
| | | | | ACTGGAACTAACTTCTACCACTACGGTTTG |
| | | | | GGCGTCTGGGGCCAAGGGACCACGGTCACC |
| | | | | GTCTCCTCAG |
| 246 | 413G05 | Amino acid | | QVQLVESGGGLVKPGGSLRLSCAASGFTFSD |
| | -full | sequence of 413G05 | | YYMSWIRQVPGKGLEWVSYISTSGSTIYYAD |
| | heavy | heavy chain | | SVKGRFTISRDNAKNSLYLQMNSLRAEDAAV |
| | chain | | | YHCARGITGTNFYHYGLGVWGQGTTVTVSS |
| | sequence | | | ASTKGPSVFPLAPSSKSTSGGTAALGCLVKDY |
| | | | | FPEPVTVSWNSGALTSGVHTFPAVLQSSGLYS |
| | | | | LSSVVTVPSSSLGTQTYICNVNHKPSNTKVDK |
| | | | | KVEPKSCDKTHTCPPCPAPELLGGPSVFLFPP |
| | | | | KPKDTLMISRTPEVTCVVVDVSHEDPEVKFN |
| | | | | WYVDGVEVHNAKTKPREEQYNSTYRVVSVL |
| | | | | TVLHQDWLNGKEYKCKVSNKALPAPIEKTIS |
| | | | | KAKGQPREPQVYTLPPSRDELTKNQVSLTCL |
| | | | | VKGFYPSDIAVEWESNGQPENNYKTTPPVLD |
| | | | | SDGSFFLYSKLTVDKSRWQQGNVFSCSVMHE |
| | | | | ALHNHYTQKSLSLSPGK |
| 247 | 413G05 | Nucleic acid | | CAGGTGCAGCTGGTGGAGTCTGGGGGAGGC |
| | -full | sequence of 413G05 | | TTGGTCAAGCCTGGAGGGTCCCTGAGACTC |
| | heavy | heavy chain | | TCCTGTGCAGCCTCTGGATTCACCTTCAGTG |
| | chain | | | ACTACTACATGAGCTGGATCCGCCAGGTTC |
| | sequence | | | CAGGGAAGGGGCTGGAGTGGGTTTCATACA |
| | | | | TTAGTACTAGTGGTAGTACCATATACTACG |
| | | | | CAGACTCTGTGAAGGGCCGATTCACCATCT |
| | | | | CCAGGGACAACGCCAAGAACTCACTGTATC |
| | | | | TACAAATGAACAGCCTGAGAGCCGAGGAC |
| | | | | GCGGCCGTGTATCACTGTGCGAGAGGTATA |
| | | | | ACTGGAACTAACTTCTACCACTACGGTTTG |
| | | | | GGCGTCTGGGGCCAAGGGACCACGGTCACC |
| | | | | GTCTCCTCAGCCAGCACCAAGGGCCCCTCT |
| | | | | GTGTTCCCTCTGGCCCCTTCCAGCAAGTCCA |
| | | | | CCTCTGGCGGAACAGCCGCTCTGGGCTGCC |
| | | | | TCGTGAAGGACTACTTCCCCGAGCCTGTGA |
| | | | | CCGTGTCCTGGAACTCTGGCGCTCTGACCA |
| | | | | GCGGAGTGCACACCTTCCCTGCTGTGCTGC |
| | | | | AGTCCTCCGGCCTGTACTCCCTGTCCTCCGT |
| | | | | CGTGACCGTGCCTTCCAGCTCTCTGGGCAC |
| | | | | CCAGACCTACATCTGCAACGTGAACCACAA |
| | | | | GCCCTCCAACACCAAGGTGGACAAGAAGGT |
| | | | | GGAACCCAAGTCCTGCGACAAGACCCACAC |
| | | | | CTGTCCCCCTTGTCCTGCCCCTGAACTGCTG |
| | | | | GGCGGACCTTCCGTGTTCCTGTTCCCCCCAA |
| | | | | AGCCCAAGGACACCCTGATGATCTCCCGGA |
| | | | | CCCCCGAAGTGACCTGCGTGGTGGTGGATG |
| | | | | TGTCCCACGAGGACCCTGAAGTGAAGTTCA |
| | | | | ATTGGTACGTGGACGGCGTGGAAGTGCACA |
| | | | | ACGCCAAGACCAAGCCTAGAGAGGAACAG |
| | | | | TACAACTCCACCTACCGGGTGGTGTCCGTG |
| | | | | CTGACCGTGCTGCACCAGGATTGGCTGAAC |
| | | | | GGCAAAGAGTACAAGTGCAAGGTGTCCAA |
| | | | | CAAGGCCCTGCCTGCCCCCATCGAAAAGAC |
| | | | | CATCTCCAAGGCCAAGGGCCAGCCCCGGGA |
| | | | | ACCCCAGGTGTACACACTGCCCCCTAGCAG |
| | | | | GGACGAGCTGACCAAGAACCAGGTGTCCCT |
| | | | | GACCTGTCTCGTGAAAGGCTTCTACCCCTCC |
| | | | | GATATCGCCGTGGAATGGGAGTCCAACGGC |
| | | | | CAGCCTGAGAACAACTACAAGACCACCCCC |
| | | | | CCTGTGCTGGACTCCGACGGCTCATTCTTCC |
| | | | | TGTACAGCAAGCTGACAGTGGACAAGTCCC |
| | | | | GGTGGCAGCAGGGCAACGTGTTCTCCTGCT |
| | | | | CCGTGATGCACGAGGCCCTGCACAACCACT |
| | | | | ACACCCAGAAGTCCCTGTCCCTGAGCCCCG |
| | | | | GCAAG |
| 248 | 413G05 | Amino acid | | QGINSW |
| | CDRL1 | sequence of CDRL1 | | |
| | (IMGT) | of 413G05 using | | |
| | | IMGT | | |
| 249 | 413G05 | Amino acid | | AAS |
| | CDRL2 | sequence of CDRL2 | | |
| | (IMGT) | of 413G05 using | | |
| | | IMGT | | |
| 250 | 413G05 | Amino acid | | QQVNSFPLT |
| | CDRL3 | sequence of CDRL3 | | |
| | (IMGT) | of 413G05 using | | |
| | | IMGT | | |
| 251 | 413G05 | Amino acid | | RASQGINSWLA |
| | CDRL1 | sequence of CDRL1 | | |
| | (Kabat) | of 413G05 using | | |
| | | Kabat | | |
| 252 | 413G05 | Amino acid | | AASTLQS |
| | CDRL2 | sequence of CDRL2 | | |
| | (Kabat) | of 413G05 using | | |
| | | Kabat | | |
| 253 | 413G05 | Amino acid | | QQVNSFPLT |
| | CDRL3 | sequence of CDRL3 | | |
| | (Kabat) | of 413G05 using | | |
| | | Kabat | | |
| 254 | 413G05 | Amino acid | | DIQMTQSPSSVSASVGDRVTITCRASQGINSW |
| | -Light | sequence of V_{L} of | | LAWYQQKPGKAPKLLIYAASTLQSGVPSRFS |
| | chain | 413G05 | | GSGSGADFTLTISSLQPEDFATYYCQQVNSFP |
| | variable | | | LTFGGGTKVEIK |
| | region | | | |
| 255 | 413G05 | Nucleic acid | | GACATCCAGATGACCCAGTCTCCATCTTCC |
| | -Light | sequence of V_{L} of | | GTGTCTGCATCTGTAGGAGACAGAGTCACC |
| | chain | 413G05 | | ATCACTTGTCGGGCGAGTCAGGGTATTAAC |
| | variable | | | AGCTGGTTAGCCTGGTATCAGCAGAAACCA |
| | region | | | GGGAAAGCCCCTAAGCTCCTGATCTATGCT |
| | | | | GCATCCACTTTGCAAAGTGGGGTCCCATCA |
| | | | | AGGTTCAGCGGCAGTGGGTCTGGGGCAGAT |
| | | | | TTCACTCTCACCATCAGCAGCCTGCAGCCT |
| | | | | GAAGATTTTGCAACTTACTATTGTCAACAG |
| | | | | GTTAACAGTTTCCCGCTCACTTTCGGCGGA |
| | | | | GGGACCAAGGTGGAGATCAAAC |
| 256 | 413G05 | Amino acid | | DIQMTQSPSSVSASVGDRVTITCRASQGINSW |
| | -full | sequence of 413G05 | | LAWYQQKPGKAPKLLIYAASTLQSGVPSRFS |
| | light | light chain | | GSGSGADFTLTISSLQPEDFATYYCQQVNSFP |
| | chain | | | LTFGGGTKVEIKRTVAAPSVFIFPPSDEQLKSG |
| | sequence | | | TASVVCLLNNFYPREAKVQWKVDNALQSGN |
| | | | | SQESVTEQDSKDSTYSLSSTLTLSKADYEKHK |
| | | | | VYACEVTHQGLSSPVTKSFNRGEC |
| 257 | 413G05 | Nucleic acid | | GACATCCAGATGACCCAGTCTCCATCTTCC |
| | -full | sequence of 413G05 | | GTGTCTGCATCTGTAGGAGACAGAGTCACC |
| | light | light chain | | ATCACTTGTCGGGCGAGTCAGGGTATTAAC |
| | chain | | | AGCTGGTTAGCCTGGTATCAGCAGAAACCA |
| | sequence | | | GGGAAAGCCCCTAAGCTCCTGATCTATGCT |
| | | | | GCATCCACTTTGCAAAGTGGGGTCCCATCA |
| | | | | AGGTTCAGCGGCAGTGGGTCTGGGGCAGAT |
| | | | | TTCACTCTCACCATCAGCAGCCTGCAGCCT |
| | | | | GAAGATTTTGCAACTTACTATTGTCAACAG |
| | | | | GTTAACAGTTTCCCGCTCACTTTCGGCGGA |
| | | | | GGGACCAAGGTGGAGATCAAACGTACGGT |
| | | | | GGCCGCTCCCTCCGTGTTCATCTTCCCACCT |
| | | | | TCCGACGAGCAGCTGAAGTCCGGCACCGCT |
| | | | | TCTGTCGTGTGCCTGCTGAACAACTTCTACC |
| | | | | CCCGCGAGGCCAAGGTGCAGTGGAAGGTG |
| | | | | GACAACGCCCTGCAGTCCGGCAACTCCCAG |
| | | | | GAATCCGTGACCGAGCAGGACTCCAAGGAC |
| | | | | AGCACCTACTCCCTGTCCTCCACCCTGACCC |
| | | | | TGTCCAAGGCCGACTACGAGAAGCACAAG |
| | | | | GTGTACGCCTGCGAAGTGACCCACCAGGGC |
| | | | | CTGTCTAGCCCCGTGACCAAGTCTTTCAACC |
| | | | | GGGGCGAGTGT |
| 258 | 413F09- | Amino acid | | GFTFSYYA |
| | CDRH1 | sequence of CDRH1 | | |
| | (IMGT) | of 413F09 using | | |
| | | IMGT | | |
| 259 | 413F09- | Amino acid | | ISGGGGNT |
| | CDRH2 | sequence of CDRH2 | | |
| | (IMGT) | of 413F09 using | | |
| | | IMGT | | |
| 260 | 413F09- | Amino acid | | AKDRMKQLVRAYYFDY |
| | CDRH3 | sequence of CDRH3 | | |
| | (IMGT) | of 413F09 using | | |
| | | IMGT | | |
| 261 | 413F09- | Amino acid | | YYAMS |
| | CDRH1 | sequence of CDRH1 | | |
| | (Kabat) | of 413F09 using | | |
| | | Kabat | | |
| 262 | 413F09- | Amino acid | | TISGGGGNTHYADSVKG |
| | CDRH2 | sequence of CDRH2 | | |
| | (Kabat) | of 413F09 using | | |
| | | Kabat | | |
| 263 | 413F09- | Amino acid | | DRMKQLVRAYYFDY |
| | CDRH3 | sequence of CDRH3 | | |
| | (Kabat) | of 413F09 using | | |
| | | Kabat | | |
| 264 | 413F09- | Amino acid | | EVPLVESGGGLVQPGGSLRLSCAASGFTFSYY |
| | Heavy | sequence of V_{H} of | | AMSWVRQAPGKGLDWVSTISGGGGNTHYAD |
| | chain | 413F09 | | SVKGRFTISRDNSKNTLYLHMNSLRAEDTAV |
| | variable | | | YYCAKDRMKQLVRAYYFDYWGQGTLVTVS |
| | region | | | s |
| 265 | 413F09- | Nucleic acid | | GAGGTGCCGCTGGTGGAGTCTGGGGGAGGC |
| | Heavy | sequence of V_{H} of | | TTGGTACAGCCTGGGGGGTCCCTGAGACTC |
| | chain | 413F09 | | TCCTGTGCAGCCTCTGGATTCACGTTTAGCT |
| | variable | | | ACTATGCCATGAGCTGGGTCCGTCAGGCTC |
| | region | | | CAGGGAAGGGGCTGGACTGGGTCTCAACTA |
| | | | | TTAGTGGTGGTGGTGGTAACACACACTACG |
| | | | | CAGACTCCGTGAAGGGCCGATTCACTATAT |
| | | | | CCAGAGACAATTCCAAGAACACGCTGTATC |
| | | | | TGCACATGAACAGCCTGAGAGCCGAAGAC |
| | | | | ACGGCCGTCTATTACTGTGCGAAGGATCGG |
| | | | | ATGAAACAGCTCGTCCGGGCCTACTACTTT |
| | | | | GACTACTGGGGCCAGGGAACCCTGGTCACC |
| | | | | GTCTCCTCAG |
| 266 | 413F09- | Amino acid | | EVPLVESGGGLVQPGGSLRLSCAASGFTFSYY |
| | full | sequence of 413F09 | | AMSWVRQAPGKGLDWVSTISGGGGNTHYAD |
| | heavy | heavy chain | | SVKGRFTISRDNSKNTLYLHMNSLRAEDTAV |
| | chain | | | YYCAKDRMKQLVRAYYFDYWGQGTLVTVS |
| | sequence | | | SASTKGPSVFPLAPSSKSTSGGTAALGCLVKD |
| | | | | YFPEPVTVSWNSGALTSGVHTFPAVLQSSGL |
| | | | | YSLSSWTVPSSSLGTQTYICNVNHKPSNTKV |
| | | | | DKKVEPKSCDKTHTCPPCPAPELLGGPSVFLF |
| | | | | PPKPKDTLMISRTPEVTCVVVDVSHEDPEVKF |
| | | | | NWYVDGVEVHNAKTKPREEQYNSTYRVVSV |
| | | | | LTVLHQDWLNGKEYKCKVSNKALPAPIEKTI |
| | | | | SKAKGQPREPQVYTLPPSRDELTKNQVSLTCL |
| | | | | VKGFYPSDIAVEWESNGQPENNYKTTPPVLD |
| | | | | SDGSFFLYSKLTVDKSRWQQGNVFSCSVMHE |
| | | | | ALHNHYTQKSLSLSPGK |
| 267 | 413F09- | Nucleic acid | | GAGGTGCCGCTGGTGGAGTCTGGGGGAGGC |
| | full | sequence of 413F09 | | TTGGTACAGCCTGGGGGGTCCCTGAGACTC |
| | heavy | heavy chain | | TCCTGTGCAGCCTCTGGATTCACGTTTAGCT |
| | chain | | | ACTATGCCATGAGCTGGGTCCGTCAGGCTC |
| | sequence | | | CAGGGAAGGGGCTGGACTGGGTCTCAACTA |
| | | | | TTAGTGGTGGTGGTGGTAACACACACTACG |
| | | | | CAGACTCCGTGAAGGGCCGATTCACTATAT |
| | | | | CCAGAGACAATTCCAAGAACACGCTGTATC |
| | | | | TGCACATGAACAGCCTGAGAGCCGAAGAC |
| | | | | ACGGCCGTCTATTACTGTGCGAAGGATCGG |
| | | | | ATGAAACAGCTCGTCCGGGCCTACTACTTT |
| | | | | GACTACTGGGGCCAGGGAACCCTGGTCACC |
| | | | | GTCTCCTCAGCCAGCACCAAGGGCCCCTCT |
| | | | | GTGTTCCCTCTGGCCCCTTCCAGCAAGTCCA |
| | | | | CCTCTGGCGGAACAGCCGCTCTGGGCTGCC |
| | | | | TCGTGAAGGACTACTTCCCCGAGCCTGTGA |
| | | | | CCGTGTCCTGGAACTCTGGCGCTCTGACCA |
| | | | | GCGGAGTGCACACCTTCCCTGCTGTGCTGC |
| | | | | AGTCCTCCGGCCTGTACTCCCTGTCCTCCGT |
| | | | | CGTGACCGTGCCTTCCAGCTCTCTGGGCAC |
| | | | | CCAGACCTACATCTGCAACGTGAACCACAA |
| | | | | GCCCTCCAACACCAAGGTGGACAAGAAGGT |
| | | | | GGAACCCAAGTCCTGCGACAAGACCCACAC |
| | | | | CTGTCCCCCTTGTCCTGCCCCTGAACTGCTG |
| | | | | GGCGGACCTTCCGTGTTCCTGTTCCCCCCAA |
| | | | | AGCCCAAGGACACCCTGATGATCTCCCGGA |
| | | | | CCCCCGAAGTGACCTGCGTGGTGGTGGATG |
| | | | | TGTCCCACGAGGACCCTGAAGTGAAGTTCA |
| | | | | ATTGGTACGTGGACGGCGTGGAAGTGCACA |
| | | | | ACGCCAAGACCAAGCCTAGAGAGGAACAG |
| | | | | TACAACTCCACCTACCGGGTGGTGTCCGTG |
| | | | | CTGACCGTGCTGCACCAGGATTGGCTGAAC |
| | | | | GGCAAAGAGTACAAGTGCAAGGTGTCCAA |
| | | | | CAAGGCCCTGCCTGCCCCCATCGAAAAGAC |
| | | | | CATCTCCAAGGCCAAGGGCCAGCCCCGGGA |
| | | | | ACCCCAGGTGTACACACTGCCCCCTAGCAG |
| | | | | GGACGAGCTGACCAAGAACCAGGTGTCCCT |
| | | | | GACCTGTCTCGTGAAAGGCTTCTACCCCTCC |
| | | | | GATATCGCCGTGGAATGGGAGTCCAACGGC |
| | | | | CAGCCTGAGAACAACTACAAGACCACCCCC |
| | | | | CCTGTGCTGGACTCCGACGGCTCATTCTTCC |
| | | | | TGTACAGCAAGCTGACAGTGGACAAGTCCC |
| | | | | GGTGGCAGCAGGGCAACGTGTTCTCCTGCT |
| | | | | CCGTGATGCACGAGGCCCTGCACAACCACT |
| | | | | ACACCCAGAAGTCCCTGTCCCTGAGCCCCG |
| | | | | GCAAG |
| 268 | 413F09- | Amino acid | | QDISTY |
| | CDRL1 | sequence of CDRL1 | | |
| | (IMGT) | of 413F09 using | | |
| | | IMGT | | |
| 269 | 413F09- | Amino acid | | GTS |
| | CDRL2 | sequence of CDRL2 | | |
| | (IMGT) | of 413F09 using | | |
| | | IMGT | | |
| 270 | 413F09- | Amino acid | | QQLHTDPIT |
| | CDRL3 | sequence of CDRL3 | | |
| | (IMGT) | of 413F09 using | | |
| | | IMGT | | |
| 271 | 413F09- | Amino acid | | WASQDISTYLG |
| | CDRL1 | sequence of CDRL1 | | |
| | (Kabat) | of 413F09 using | | |
| | | Kabat | | |
| 272 | 413F09- | Amino acid | | GTSSLQS |
| | CDRL2 | sequence of CDRL2 | | |
| | (Kabat) | of 413F09 using | | |
| | | Kabat | | |
| 273 | 413F09- | Amino acid | | QQLHTDPIT |
| | CDRL3 | sequence of CDRL3 | | |
| | (Kabat) | of 413F09 using | | |
| | | Kabat | | |
| 274 | 413F09- | Amino acid | | DIQLTQSPSFLSASVGDRVTITCWASQDISTYL |
| | Light | sequence of V_{L} of | | GWYQQKPGKAPKLLIYGTSSLQSGVPSRFSGS |
| | chain | 413F09 | | GSGTEFTLTISSLQPEDFATYYCQQLHTDPITF |
| | variable | | | GQGTRLEIK |
| | region | | | |
| 275 | 413F09- | Nucleic acid | | GACATCCAGTTGACCCAGTCTCCATCCTTCC |
| | Light | sequence of V_{L} of | | TGTCTGCATCTGTAGGAGACAGAGTCACCA |
| | chain | 413F09 | | TCACTTGCTGGGCCAGTCAGGACATTAGCA |
| | variable | | | CTTATTTAGGCTGGTATCAGCAAAAACCAG |
| | region | | | GGAAAGCCCCTAAGCTCCTGATCTATGGTA |
| | | | | CATCCAGTTTGCAAAGTGGGGTCCCATCAA |
| | | | | GGTTCAGCGGCAGTGGATCTGGGACAGAAT |
| | | | | TCACTCTCACAATCAGCAGCCTGCAGCCTG |
| | | | | AAGATTTTGCAACTTATTACTGTCAACAGCT |
| | | | | TCATACTGACCCGATCACCTTCGGCCAAGG |
| | | | | GACACGACTGGAGATCAAAC |
| 276 | 413F09- | Amino acid | | DIQLTQSPSFLSASVGDRVTITCWASQDISTYL |
| | full light | sequence of 413F09 | | GWYQQKPGKAPKLLIYGTSSLQSGVPSRFSGS |
| | chain | light chain | | GSGTEFTLTISSLQPEDFATYYCQQLHTDPITF |
| | sequence | | | GQGTRLEIKRTVAAPSVFIFPPSDEQLKSGTAS |
| | | | | VVCLLNNFYPREAKVQWKVDNALQSGNSQE |
| | | | | SVTEQDSKDSTYSLSSTLTLSKADYEKHKVY |
| | | | | ACEVTHQGLSSPVTKSFNRGEC |
| 277 | 413F09- | Nucleic acid | | GACATCCAGTTGACCCAGTCTCCATCCTTCC |
| | full light | sequence of 413F09 | | TGTCTGCATCTGTAGGAGACAGAGTCACCA |
| | chain | light chain | | TCACTTGCTGGGCCAGTCAGGACATTAGCA |
| | sequence | | | CTTATTTAGGCTGGTATCAGCAAAAACCAG |
| | | | | GGAAAGCCCCTAAGCTCCTGATCTATGGTA |
| | | | | CATCCAGTTTGCAAAGTGGGGTCCCATCAA |
| | | | | GGTTCAGCGGCAGTGGATCTGGGACAGAAT |
| | | | | TCACTCTCACAATCAGCAGCCTGCAGCCTG |
| | | | | AAGATTTTGCAACTTATTACTGTCAACAGCT |
| | | | | TCATACTGACCCGATCACCTTCGGCCAAGG |
| | | | | GACACGACTGGAGATCAAACGTACGGTGGC |
| | | | | CGCTCCCTCCGTGTTCATCTTCCCACCTTCC |
| | | | | GACGAGCAGCTGAAGTCCGGCACCGCTTCT |
| | | | | GTCGTGTGCCTGCTGAACAACTTCTACCCCC |
| | | | | GCGAGGCCAAGGTGCAGTGGAAGGTGGAC |
| | | | | AACGCCCTGCAGTCCGGCAACTCCCAGGAA |
| | | | | TCCGTGACCGAGCAGGACTCCAAGGACAGC |
| | | | | ACCTACTCCCTGTCCTCCACCCTGACCCTGT |
| | | | | CCAAGGCCGACTACGAGAAGCACAAGGTG |
| | | | | TACGCCTGCGAAGTGACCCACCAGGGCCTG |
| | | | | TCTAGCCCCGTGACCAAGTCTTTCAACCGG |
| | | | | GGCGAGTGT |
| 278 | 414B06- | Amino acid | | GFTFSSYW |
| | CDRH1 | sequence of CDRH1 | | |
| | (IMGT) | of 414B06 using | | |
| | | IMGT | | |
| 279 | 414B06- | Amino acid | | IKQDGSEK |
| | CDRH2 | sequence of CDRH2 | | |
| | (IMGT) | of 414B06 using | | |
| | | IMGT | | |
| 280 | 414B06- | Amino acid | | ARVRQWSDYSDY |
| | CDRH3 | sequence of CDRH3 | | |
| | (IMGT) | of 414B06 using | | |
| | | IMGT | | |
| 281 | 414B06- | Amino acid | | SYWMN |
| | CDRH1 | sequence of CDRH1 | | |
| | (Kabat) | of 414B06 using | | |
| | | Kabat | | |
| 282 | 414B06- | Amino acid | | NIKQDGSEKYYVDSVKG |
| | CDRH2 | sequence of CDRH2 | | |
| | (Kabat) | of 414B06 using | | |
| | | Kabat | | |
| 283 | 414B06- | Amino acid | | VRQWSDYSDY |
| | CDRH3 | sequence of CDRH3 | | |
| | (Kabat) | of 414B06 using | | |
| | | Kabat | | |
| 284 | 414B06 | Amino acid | | EVHLVESGGGLVQPGGSLRLSCAASGFTFSSY |
| | -Heavy | sequence of V_{H} of | | WMNWVRQAPGKGLEWVANIKQDGSEKYYV |
| | chain | 414B06 | | DSVKGRFTVSRDNAKNSLYLQMNSLRAEDT |
| | variable | | | AVYYCARVRQWSDYSDYWGQGTPVTVSS |
| | region | | | |
| 285 | 414B06 | Nucleic acid | | GAGGTGCACCTGGTGGAGTCTGGGGGAGGC |
| | -Heavy | sequence of V_{H} of | | TTGGTCCAGCCTGGGGGGTCCCTGAGACTC |
| | chain | 414B06 | | TCCTGTGCAGCCTCTGGATTCACCTTTAGTA |
| | variable | | | GCTATTGGATGAACTGGGTCCGCCAGGCTC |
| | region | | | CAGGGAAGGGGCTGGAGTGGGTGGCCAAC |
| | | | | ATAAAGCAAGATGGAAGTGAGAAATACTA |
| | | | | TGTGGACTCTGTGAAGGGCCGCTTCACCGT |
| | | | | CTCCAGAGACAACGCCAAGAACTCACTGTA |
| | | | | TCTGCAAATGAACAGCCTGAGAGCCGAGGA |
| | | | | CACGGCTGTGTATTACTGTGCGAGAGTTCG |
| | | | | ACAATGGTCCGACTACTCTGACTACTGGGG |
| | | | | CCAGGGAACCCCGGTCACCGTCTCCTCAG |
| 286 | 414B06 | Amino acid | | EVHLVESGGGLVQPGGSLRLSCAASGFTFSSY |
| | -full | sequence of 414B06 | | WMNWVRQAPGKGLEWVANIKQDGSEKYYV |
| | heavy | heavy chain | | DSVKGRFTVSRDNAKNSLYLQMNSLRAEDT |
| | chain | | | AVYYCARVRQWSDYSDYWGQGTPVTVSSAS |
| | sequence | | | TKGPSVFPLAPSSKSTSGGTAALGCLVKDYFP |
| | | | | EPVTVSWNSGALTSGVHTFPAVLQSSGLYSLS |
| | | | | SWTVPSSSLGTQTYICNVNHKPSNTKVDKK |
| | | | | VEPKSCDKTHTCPPCPAPELLGGPSVFLFPPKP |
| | | | | KDTLMISRTPEVTCVVVDVSHEDPEVKFNWY |
| | | | | VDGVEVHNAKTKPREEQYNSTYRVVSVLTV |
| | | | | LHQDWLNGKEYKCKVSNKALPAPIEKTISKA |
| | | | | KGQPREPQVYTLPPSRDELTKNQVSLTCLVK |
| | | | | GFYPSDIAVEWESNGQPENNYKTTPPVLDSD |
| | | | | GSFFLYSKLTVDKSRWQQGNVFSCSVMHEAL |
| | | | | HNHYTQKSLSLSPGK |
| 287 | 414B06 | Nucleic acid | | GAGGTGCACCTGGTGGAGTCTGGGGGAGGC |
| | -full | sequence of 414B06 | | TTGGTCCAGCCTGGGGGGTCCCTGAGACTC |
| | heavy | heavy chain | | TCCTGTGCAGCCTCTGGATTCACCTTTAGTA |
| | chain | | | GCTATTGGATGAACTGGGTCCGCCAGGCTC |
| | sequence | | | CAGGGAAGGGGCTGGAGTGGGTGGCCAAC |
| | | | | ATAAAGCAAGATGGAAGTGAGAAATACTA |
| | | | | TGTGGACTCTGTGAAGGGCCGCTTCACCGT |
| | | | | CTCCAGAGACAACGCCAAGAACTCACTGTA |
| | | | | TCTGCAAATGAACAGCCTGAGAGCCGAGGA |
| | | | | CACGGCTGTGTATTACTGTGCGAGAGTTCG |
| | | | | ACAATGGTCCGACTACTCTGACTACTGGGG |
| | | | | CCAGGGAACCCCGGTCACCGTCTCCTCAGC |
| | | | | CAGCACCAAGGGCCCCTCTGTGTTCCCTCT |
| | | | | GGCCCCTTCCAGCAAGTCCACCTCTGGCGG |
| | | | | AACAGCCGCTCTGGGCTGCCTCGTGAAGGA |
| | | | | CTACTTCCCCGAGCCTGTGACCGTGTCCTGG |
| | | | | AACTCTGGCGCTCTGACCAGCGGAGTGCAC |
| | | | | ACCTTCCCTGCTGTGCTGCAGTCCTCCGGCC |
| | | | | TGTACTCCCTGTCCTCCGTCGTGACCGTGCC |
| | | | | TTCCAGCTCTCTGGGCACCCAGACCTACAT |
| | | | | CTGCAACGTGAACCACAAGCCCTCCAACAC |
| | | | | CAAGGTGGACAAGAAGGTGGAACCCAAGT |
| | | | | CCTGCGACAAGACCCACACCTGTCCCCCTT |
| | | | | GTCCTGCCCCTGAACTGCTGGGCGGACCTT |
| | | | | CCGTGTTCCTGTTCCCCCCAAAGCCCAAGG |
| | | | | ACACCCTGATGATCTCCCGGACCCCCGAAG |
| | | | | TGACCTGCGTGGTGGTGGATGTGTCCCACG |
| | | | | AGGACCCTGAAGTGAAGTTCAATTGGTACG |
| | | | | TGGACGGCGTGGAAGTGCACAACGCCAAG |
| | | | | ACCAAGCCTAGAGAGGAACAGTACAACTCC |
| | | | | ACCTACCGGGTGGTGTCCGTGCTGACCGTG |
| | | | | CTGCACCAGGATTGGCTGAACGGCAAAGAG |
| | | | | TACAAGTGCAAGGTGTCCAACAAGGCCCTG |
| | | | | CCTGCCCCCATCGAAAAGACCATCTCCAAG |
| | | | | GCCAAGGGCCAGCCCCGGGAACCCCAGGT |
| | | | | GTACACACTGCCCCCTAGCAGGGACGAGCT |
| | | | | GACCAAGAACCAGGTGTCCCTGACCTGTCT |
| | | | | CGTGAAAGGCTTCTACCCCTCCGATATCGC |
| | | | | CGTGGAATGGGAGTCCAACGGCCAGCCTGA |
| | | | | GAACAACTACAAGACCACCCCCCCTGTGCT |
| | | | | GGACTCCGACGGCTCATTCTTCCTGTACAG |
| | | | | CAAGCTGACAGTGGACAAGTCCCGGTGGCA |
| | | | | GCAGGGCAACGTGTTCTCCTGCTCCGTGAT |
| | | | | GCACGAGGCCCTGCACAACCACTACACCCA |
| | | | | GAAGTCCCTGTCCCTGAGCCCCGGCAAG |
| 288 | 414B06- | Amino acid | | QGISSW |
| | CDRL1 | sequence of CDRL1 | | |
| | (IMGT) | of 414B06 using | | |
| | | IMGT | | |
| 289 | 414B06- | Amino acid | | AAS |
| | CDRL2 | sequence of CDRL2 | | |
| | (IMGT) | of 414B06 using | | |
| | | IMGT | | |
| 290 | 414B06- | Amino acid | | QQANSFPFT |
| | CDRL3 | sequence of CDRL3 | | |
| | (IMGT) | of 414B06 using | | |
| | | IMGT | | |
| 291 | 414B06- | Amino acid | | RASQGISSWLA |
| | CDRL1 | sequence of CDRL1 | | |
| | (Kabat) | of 414B06 using | | |
| | | Kabat | | |
| 292 | 414B06- | Amino acid | | AASSLQS |
| | CDRL2 | sequence of CDRL2 | | |
| | (Kabat) | of 414B06 using | | |
| | | Kabat | | |
| 293 | 414B06- | Amino acid | | QQANSFPFT |
| | CDRL3 | sequence of CDRL3 | | |
| | (Kabat) | of 414B06 using | | |
| | | Kabat | | |
| 294 | 414B06 | Amino acid | | DIQMTQSPSSVSASVGDRVTITCRASQGISSW |
| | -Light | sequence of V_{L} of | | LAWYQQKPGKAPKLLIYAASSLQSGVPSRFS |
| | chain | 414B06 | | GSGSGTDFTLTISSLQPEDFATYYCQQANSFPF |
| | variable | | | TFGPGTKVDIK |
| | region | | | |
| 295 | 414B06 | Nucleic acid | | GACATCCAGATGACCCAGTCTCCATCTTCC |
| | -Light | sequence of V_{L} of | | GTGTCTGCATCTGTAGGAGACAGAGTCACC |
| | chain | 414B06 | | ATCACTTGTCGGGCGAGTCAGGGTATTAGC |
| | variable | | | AGCTGGTTAGCCTGGTATCAGCAGAAACCA |
| | region | | | GGGAAAGCCCCTAAGCTCCTGATCTATGCT |
| | | | | GCATCCAGTTTGCAAAGTGGGGTCCCATCA |
| | | | | AGGTTCAGCGGCAGTGGATCTGGGACAGAT |
| | | | | TTCACTCTCACCATCAGCAGCCTGCAGCCT |
| | | | | GAAGATTTTGCAACTTACTATTGTCAACAG |
| | | | | GCTAACAGTTTCCCATTCACTTTCGGCCCTG |
| | | | | GGACCAAAGTGGATATCAAAC |
| 296 | 414B06 | Amino acid | | DIQMTQSPSSVSASVGDRVTITCRASQGISSW |
| | -full | sequence of 414B06 | | LAWYQQKPGKAPKLLIYAASSLQSGVPSRFS |
| | light | light chain | | GSGSGTDFTLTISSLQPEDFATYYCQQANSFPF |
| | chain | | | TFGPGTKVDIKRTVAAPSVFIFPPSDEQLKSGT |
| | sequence | | | ASVVCLLNNFYPREAKVQWKVDNALQSGNS |
| | | | | QESVTEQDSKDSTYSLSSTLTLSKADYEKHKV |
| | | | | YACEVTHQGLSSPVTKSFNRGEC |
| 297 | 414B06 | Nucleic acid | | GACATCCAGATGACCCAGTCTCCATCTTCC |
| | -full | sequence of 414B06 | | GTGTCTGCATCTGTAGGAGACAGAGTCACC |
| | light | light chain | | ATCACTTGTCGGGCGAGTCAGGGTATTAGC |
| | chain | | | AGCTGGTTAGCCTGGTATCAGCAGAAACCA |
| | sequence | | | GGGAAAGCCCCTAAGCTCCTGATCTATGCT |
| | | | | GCATCCAGTTTGCAAAGTGGGGTCCCATCA |
| | | | | AGGTTCAGCGGCAGTGGATCTGGGACAGAT |
| | | | | TTCACTCTCACCATCAGCAGCCTGCAGCCT |
| | | | | GAAGATTTTGCAACTTACTATTGTCAACAG |
| | | | | GCTAACAGTTTCCCATTCACTTTCGGCCCTG |
| | | | | GGACCAAAGTGGATATCAAACGTACGGTGG |
| | | | | CCGCTCCCTCCGTGTTCATCTTCCCACCTTC |
| | | | | CGACGAGCAGCTGAAGTCCGGCACCGCTTC |
| | | | | TGTCGTGTGCCTGCTGAACAACTTCTACCCC |
| | | | | CGCGAGGCCAAGGTGCAGTGGAAGGTGGA |
| | | | | CAACGCCCTGCAGTCCGGCAACTCCCAGGA |
| | | | | ATCCGTGACCGAGCAGGACTCCAAGGACAG |
| | | | | CACCTACTCCCTGTCCTCCACCCTGACCCTG |
| | | | | TCCAAGGCCGACTACGAGAAGCACAAGGT |
| | | | | GTACGCCTGCGAAGTGACCCACCAGGGCCT |
| | | | | GTCTAGCCCCGTGACCAAGTCTTTCAACCG |
| | | | | GGGCGAGTGT |
| 298 | Mutated | Amino acid | | DIQMTQSPSSLSASVGDRVTITCRASQSISSYL |
| | 1D05- | sequence of 1D05 | | NWYQQKPGKAPKLLIYYASSLQSGVPSRFSG |
| | LC | kappa light chain | | SGSGTDFTLTISSLQPEDFATYYCQQSYSTPIT |
| | mutant 3 | with V to Y | | FGQGTRLEIKRTVAAPSVFIFPPSDEQLKSGTA |
| | | mutation in CDRL2 | | SVVCLLNNFYPREAKVQWKVDNALQSGNSQ |
| | | highlighted | | ESVTEQDSKDSTYSLSSTLTLSKADYEKHKVY |
| | | | | ACEVTHQGLSSPVTKSFNRGEC |
| 299 | 1D05- | Amino acid | | EVQLVESGGGLVQPGRSLRLSCAASGFTFDD |
| | heavy | sequence of IgG1 | | YAMHWVRQVPGKGLEWVSGISWIRTGIGYA |
| | chain | disabled variant of | | DSVKGRFTIFRDNAKNSLYLQMNSLRAEDTA |
| | disabled | 1D05 | | LYYCAKDMKGSGTYGGWFDTWGQGTLVTV |
| | IgG1 Fc | | | SSASTKGPSVFPLAPSSKSTSGGTAALGCLVK |
| | | | | DYFPEPVTVSWNSGALTSGVHTFPAVLQSSG |
| | | | | LYSLSSVVTVPSSSLGTQTYICNVNHKPSNTK |
| | | | | VDKKVEPKSCDKTHTCPPCPAPELAGAPSVF |
| | | | | LFPPKPKDTLMISRTPEVTCVVVDVSHEDPEV |
| | | | | KFNWYVDGVEVHNAKTKPREEQYNSTYRVV |
| | | | | SVLTVLHQDWLNGKEYKCKVSNKALPAPIEK |
| | | | | TISKAKGQPREPQVYTLPPSRDELTKNQVSLT |
| | | | | CLVKGFYPSDIAVEWESNGQPENNYKTTPPV |
| | | | | LDSDGSFFLYSKLTVDKSRWQQGNVFSCSVM |
| | | | | HEALHNHYTQKSLSLSPGK |
| 300 | 1D05- | 1D05 Light chain | | DIQMTQSPSSLSASVGDRVTITCRASQSISSYL |
| | light | amino acid sequence | | NWYQQKPGKAPKLLIYVASSLQSGVPSRFSG |
| | chain IL- | sequence fused to | | SGSGTDFTLTISSLQPEDFATYYCQQSYSTPIT |
| | 2 fusion | wild-type human IL- | | FGQGTRLEIKRTVAAPSVFIFPPSDEQLKSGTA |
| | | 2 sequence (IL-2 | | SVVCLLNNFYPREAKVQWKVDNALQSGNSQ |
| | | is underlined and | | ESVTEQDSKDSTYSLSSTLTLSKADYEKHKVY |
| | | region to be varied is | | ACEVTHQGLSSPVTKSFNRGECAPTSSSTKK |
| | | shown in bold) | | TQLQLEHLLLDLQMILNGINNYKNPKLTRM |
| | | | | LTFKFYMPKKATELKHLQCLEEELKPLEEVL |
| | | | | NLAQSKNFHLRPRDLISNINVIVLELKGSETTF |
| | | | | [sequence omitted] |
| 301 | Human | Uniprot number: | | APTSSSTKKTQLQLEHLLLDLQMILNGINNY |
| | IL-2 | P60568 | | KNPKLTRMLTFKFYMPKKATELKHLQCLEEE |
| | | Full length amino | | LKPLEEVLNLAQSKNFHLRPRDLISNINVIVLE |
| | | acid sequence of | | LKGSETTFMCEYADETATIVEFLNRWITFCQSI |
| | | human IL-2 (minus | | ISTLT |
| | | signal sequence) | | |
| 302 | Control | Heavy chain 1D05 | | EVQLVESGGGLVQPGRSLRLSCAASGFTFDD |
| | 1D05 | IgG1 variant fused at | | YAMHWVRQVPGKGLEWVSGISWIRTGIGYA |
| | immuno- | the N-terminus to | | DSVKGRFTIFRDNAKNSLYLQMNSLRAEDTA |
| | cytokine | wild-type human IL2 | | LYYCAKDMKGSGTYGGWFDTWGQGTLVTV |
| | HC C- | sequence (control) | | SSASTKGPSVFPLAPSSKSTSGGTAALGCLVK |
| | terminal | | | DYFPEPVTVSWNSGALTSGVHTFPAVLQSSG |
| | fusion | | | LYSLSSVVTVPSSSLGTQTYICNVNHKPSNTK |
| | | | | VDKKVEPKSCDKTHTCPPCPAPELAGAPSVF |
| | | | | LFPPKPKDTLMISRTPEVTCVVVDVSHEDPEV |
| | | | | KFNWYVDGVEVHNAKTKPREEQYNSTYRVV |
| | | | | SVLTVLHQDWLNGKEYKCKVSNKALPAPIEK |
| | | | | TISKAKGQPREPQVYTLPPSRDELTKNQVSLT |
| | | | | CLVKGFYPSDIAVEWESNGQPENNYKTTPPV |
| | | | | LDSDGSFFLYSKLTVDKSRWQQGNVFSCSVM |
| | | | | HEALHNHYTQKSLSLSPGKAPTSSSTKKTQLQ |
| | | | | LEHLLLDLQMILNGINNYKNPKLTRMLTFKF |
| | | | | YMPKKATELKHLQCLEEELKPLEEVLNLAQS |
| | | | | KNFHLRPRDLISNINVIVLELKGSETTFMCEYA |
| | | | | DETATIVEFLNRWITFCQSIISTLT |
| 303 | IL-2 D5- | IL-2 IC45 (Del 5-9) | | APTSTQLQLELLLD |
| | 9 | N terminal IL-2 | | |
| | | sequence | | |
| 304 | IL-2D1- | IL-2 IC46 (Del 1-9) | | TQLQLEHLLLD |
| | 9 | N terminal IL-2 | | |
| | | sequence | | |
| 305 | IL-2 D5- | IL-2 IC64 (Del 5-7) | | APTSKKTQLQLEHLLLD |
| | 7 | N terminal IL-2 | | |
| | | sequence | | |
| 306 | IL-2 D1 | IL-2 DIN terminal | | PTSSSTKKTQLQLEHLLLD |
| | | IL-2 sequence | | |
| 307 | IL-2D1- | IL-2D1-2N | | TSSSTKKTQLQLEHLLLD |
| | 2 | terminal IL-2 | | |
| | | sequence | | |
| 308 | IL-2D1- | IL-2 DI-3 N | | SSSTKKTQLQLEHLLLD |
| | 3 | terminal IL-2 | | |
| | | sequence | | |
| 309 | IL-2D1- | IL-2D1-4N | | SSTKKTQLQLEHLLLD |
| | 4 | terminal IL-2 | | |
| | | sequence | | |
| 310 | IL-2D1- | IL-2 DI-5 N | | STKKTQLQLEHLLLD |
| | 5 | terminal IL-2 | | |
| | | sequence | | |
| 311 | IL-2D1- | IL-2D1-6N | | TKKTQLQLEHLLLD |
| | 6 | terminal IL-2 | | |
| | | sequence | | |
| 312 | IL-2D1- | IL-2D1-7N | | KKTQLQLEHLLLD |
| | 7 | terminal IL-2 | | |
| | | sequence | | |
| 313 | IL-2D1- | IL-2D1-8N | | KTQLQLEHLLLD |
| | 8 | terminal IL-2 | | |
| | | sequence | | |
| 314 | IL-2 D9 | IL-2 D9 N terminal | | APTSSSTKTQLQLEHLLLD |
| | | IL-2 sequence | | |
| 315 | IL-2 D9- | IL-2 D9-8 N | | APTSSSTTQLQLEHLLLD |
| | 8 | terminal IL-2 | | |
| | | sequence | | |
| 316 | IL-2 D9- | IL-2 D9-7 N | | APTSSSTQLQLEHLLLD |
| | 7 | terminal IL-2 | | |
| | | sequence | | |
| 317 | IL-2 D9- | IL-2 D9-6 N | | APTSSTQLQLEHLLLD |
| | 6 | terminal IL-2 | | |
| | | sequence | | |
| 318 | IL-2 D9- | IL-2 D9-4 N | | APTTQLQLEHLLLD |
| | 4 | terminal IL-2 | | |
| | | sequence | | |
| 319 | IL-2 D9- | IL-2 D9-3 N | | APTQLQLEHLLLD |
| | 3 | terminal IL-2 | | |
| | | sequence | | |
| 320 | IL-2 D9- | IL-2 D9-2 N | | ATQLQLEHLLLD |
| | 2 | terminal IL-2 | | |
| | | sequence | | |
| 321 | IL-2 D2- | IL-2 D2-6 N | | ATKKTQLQLEHLLLD |
| | 6 | terminal IL-2 | | |
| | | sequence | | |
| 322 | IL-2 D3- | IL-2 D3-7 N | | APKKTQLQLEHLLLD |
| | 7 | terminal IL-2 | | |
| | | sequence | | |
| 323 | IL-2 D4- | IL-2 D4-8 N | | APTKTQLQLEHLLLD |
| | 8 | terminal IL-2 | | |
| | | sequence | | |
| 324 | C- | Amino acids 21 to | | LQMILNGINNYKNPKLTRMLTFKFYMPKKAT |
| | terminal | 133 of hIL-2 | | ELKHLQCLEEELKPLEEVLNLAQSKNFHLRPR |
| | amino | | | DLISNINVIVLELKGSETTFMCEYADETATIVE |
| | acid | | | FLNRWITFCQSIISTLT |
| | sequence | | | |
| | ofhIL-2 | | | |
| 325 | Mouse | Uniprot number: | | MRIFAGIIFTACCHLLRAFTITAPKDLYVVEY |
| | PD-L1 | (ECD highlighted in | | GSNVTMECRFPVERELDLLALVVYWEKED |
| | | BOLD, and | | EQVIQFVAGEEDLKPQHSNFRGRASLPKDQ |
| | | cytoplasmic domain | | LLKGNAALQITDVKLQDAGVYCCIISYGGA |
| | | underlined) | | DYKRITLKVNAPYRKINQRISVDPATSEHEL |
| | | Q9EP73 | | ICQAEGYPEAEVIWTNSDHQPVSGKRSVTT |
| | | | | SRTEGMLLNVTSSLRVNATANDVFYCTFW |
| | | | | RSQPGQNHTAELIIPELPATHPPQNRTHWV |
| | | | | LLGSILLFLIVVSTVLLFLRKQVRMLDVEKCG |
| | | | | VEDTSSKNRNDTQFEET |
| 326 | Mouse | Mouse PD-L1 | | FTITAPKDLYVVEYGSNVTMECRFPVERELDL |
| | PD-L1 | extracellular domain | | LALVVYWEKEDEQVIQFVAGEEDLKPQHSNF |
| | ECD His | with his tag | | RGRASLPKDQLLKGNAALQITDVKLQDAGV |
| | | | | YCCIISYGGADYKRITLKVNAPYRKINQRISV |
| | | | | DPATSEHELICQAEGYPEAEVIWTNSDHQPVS |
| | | | | GKRSVTTSRTEGMLLNVTSSLRVNATANDVF |
| | | | | YCTFWRSQPGQNHTAELIIPELPATHPPQNRT |
| | | | | HHHHHH |
| 327 | Human | Human IL-2 receptor | | ELCDDDPPEIPHATFKAMAYKEGTMLNCECK |
| | IL-2Rα | alpha chain | | RGFRRIKSGSLYMLCTGNSSHSSWDNQCQCT |
| | chain | | | SSATRNTTKQVTPQPEEQKERKTTEMQSPMQ |
| | | | | PVDQASLPGHCREPPPWENEATERIYHFVVG |
| | | | | QMVYYQCVQGYRALHRGPAESVCKMTHGK |
| | | | | TRWTQPQLICTGEMETSQFPGEEKPQASPEGR |
| | | | | PESETSCLVTTTDFQIQTEMAATMETSIFTTEY |
| | | | | QVAVAGCVFLLISVLLLSGLTWQRRQRKSRR |
| | | | | TI |
| 328 | Human | Human IL-2 receptor | | AVNGTSQFTCFYNSRANISCVWSQDGALQDT |
| | IL-2RβP | beta chain | | SCQVHAWPDRRRWNQTCELLPVSQASWACN |
| | chain | | | LILGAPDSQKLTTVDIVTLRVLCREGVRWRV |
| | | | | MAIQDFKPFENLRLMAPISLQVVHVETHRCNI |
| | | | | SWEISQASHYFERHLEFEARTLSPGHTWEEAP |
| | | | | LLTLKQKQEWICLETLTPDTQYEFQVRVKPL |
| | | | | QGEFTTWSPWSQPLAFRTKPAALGKDTIPWL |
| | | | | GHLLVGLSGAFGFIILVYLLINCRNTGPWLKK |
| | | | | VLKCNTPDPSKFFSQLSSEHGGDVQKWLSSPF |
| | | | | PSSSFSPGGLAPEISPLEVLERDKVTQLLLQQD |
| | | | | KVPEPASLSSNHSLTSCFTNQGYFFFHLPDAL |
| | | | | EIEACQVYFTYDPYSEEDPDEGVAGAPTGSSP |
| | | | | QPLQPLSGEDDAYCTFPSRDDLLLFSPSLLGG |
| | | | | PSPPSTAPGGSGAGEERMPPSLQERVPRDWDP |
| | | | | QPLGPPTPGVPDLVDFQPPPELVLREAGEEVP |
| | | | | DAGPREGVSFPWSRPPGQGEFRALNARLPLN |
| | | | | TDAYLSLQELQGQDPTHLV |
| 329 | Human | Human IL-2 receptor | | LNTTILTPNGNEDTTADFFLTTMPTDSLSVSTL |
| | IL-2Rγ | common gamma | | PLPEVQCFVFNVEYMNCTWNSSSEPQPTNLT |
| | chain | chain | | LHYWYKNSDNDKVQKCSHYLFSEEITSGCQL |
| | | | | QKKEIHLYQTFVVQLQDPREPRRQATQMLKL |
| | | | | QNLVIPWAPENLTLHKLSESQLELNWNNRFL |
| | | | | NHCLEHLVQYRTDWDHSWTEQSVDYRHKFS |
| | | | | LPSVDGQKRYTFRVRSRFNPLCGSAQHWSEW |
| | | | | SHPIHWGSNTSKENPFLFALEAVVISVGSMGL |
| | | | | IISLLCVYFWLERTMPRIPTLKNLEDLVTEYH |
| | | | | GNFSAWSGVSKGLAESLQPDYSERLCLVSEIP |
| | | | | PKGGALGEGPGASPCNQHSPYWAPPCYTLKP |
| | | | | ET |
| 330 | IL-7 | Human IL-7 amino | | DCDIEGKDGKQYESVLMVSIDQLLDSMKEIG |
| | | acid sequence | | SNCLNNEFNFFKRHICDANKEGMFLFRAARK |
| | | | | LRQFLKMNSTGDFDLHLLKVSEGTTILLNCTG |
| | | | | QVKGRKPAALGEAQPTKSLEENKSLKEQKKL |
| | | | | NDLCFLKRLLQEIKTCWNKILMGTKEH |
| 331 | IL-15 | Human IL-15 amino | | GIHVFILGCFSAGLPKTEANWVNVISDLKKIE |
| | | acid sequence | | DLIQSMHIDATLYTESDVHPSCKVTAMKCFLL |
| | | | | ELQVISLESGDASIHDTVENLIILANNSLSSNG |
| | | | | NVTESGCKECEELEEKNIKEFLQSFVHIVQMFI |
| | | | | NTS |
| 332 | IL-21 | Human IL-21 amino | | QGQDRHMIRMRQLIDIVDQLKNYVNDLVPEF |
| | | acid sequence | | LPAPEDVETNCEWSAFSCFQKAQLKSANTGN |
| | | | | NERIINVSIKKLKRKPPSTNAGRRQKHRLTCPS |
| | | | | CDSYEKKPPKEFLERFKSLLQKMIHQHLSSRT |
| | | | | HGSEDS |
| 333 | GM-CSF | Human GM-CSF | | APARSPSPSTQPWEHVNAIQEARRLLNLSRDT |
| | | amino acid sequence | | AAEMNETVEVISEMFDLQEPTCLQTRLELYK |
| | | | | QGLRGSLTKLKGPLTMMASHYKQHCPPTPET |
| | | | | SCATQIITFESFKENLKDFLLVIPFDCWEPVQE |
| 334 | IFNα | Human IFN-α | | CDLPQNHGLLSRNTLVLLHQMRRISPFLCLKD |
| | | amino acid sequence | | RRDFRFPQEMVKGSQLQKAHVMSVLHEMLQ |
| | | | | QIFSLFHTERSSAAWNMTLLDQLHTELHQQL |
| | | | | QHLETCLLQVVGEGESAGAISSPALTLRRYFQ |
| | | | | GIRVYLKEKKYSDCAWEVVRMEIMKSLFLST |
| | | | | NMQERLRSKDRDLGS |
| 335 | TNFα | Extracellular portion | | GPQREEFPRDLSLISPLAQAVRSSSRTPSDKPV |
| | | of human TNF-a | | AHVVANPQAEGQLQWLNRRANALLANGVEL |
| | | amino acid sequence | | RDNQLVVPSEGLYLIYSQVLFKGQGCPSTHVL |
| | | | | LTHTISRIAVSYQTKVNLLSAIKSPCQRETPEG |
| | | | | AEAKPWYEPIYLGGVFQLEKGDRLSAEINRPD |
| | | | | YLDFAESGQVYFGIIAL |
| 336 | IL-12α | Alpha chain of | | RNLPVATPDPGMFPCLHHSQNLLRAVSNMLQ |
| | | human IL-12 amino | | KARQTLEFYPCTSEEIDHEDITKDKTSTVEAC |
| | | acid sequence | | LPLELTKNESCLNSRETSFITNGSCLASRKTSF |
| | | | | MMALCLSSIYEDLKMYQVEFKTMNAKLLMD |
| | | | | PKRQIFLDQNMLAVIDELMQALNFNSETVPQ |
| | | | | KSSLEEPDFYKTKIKLCILLHAFRIRAVTIDRV |
| | | | | MSYLNAS |
| 337 | IL-12β | Beta chain of human | | IWELKKDVYVVELDWYPDAPGEMVVLTCDT |
| | | IL-12 amino acid | | PEEDGITWTLDQSSEVLGSGKTLTIQVKEFGD |
| | | sequence | | AGQYTCHKGGEVLSHSLLLLHKKEDGIWSTD |
| | | | | ILKDQKEPKNKTFLRCEAKNYSGRFTCWWLT |
| | | | | TISTDLTFSVKSSRGSSDPQGVTCGAATLSAE |
| | | | | RVRGDNKEYEYSVECQEDSACPAAEESLPIEV |
| | | | | MVDAVHKLKYENYTSSFFIRDIIKPDPPKNLQ |
| | | | | LKPLKNSRQVEVSWEYPDTWSTPHSYFSLTF |
| | | | | CVQVQGKSKREKKDRVFTDKTSATVICRKNA |
| | | | | SISVRAQDRYYSSSWSEWASVPCS |
| 338 | CXCL9 | Human CXCL-9 | | TPVVRKGRCSCISTNQGTIHLQSLKDLKQFAP |
| | | amino acid sequence | | SPSCEKIEIIATLKNGVQTCLNPDSADVKELIK |
| | | | | KWEKQVSQKKKQKNGKKHQKKKVLKVRKS |
| | | | | QRSRQKKTT |
| 339 | CXCL10 | Human CXCL-10 | | VPLSRTVRCTCISISNQPVNPRSLEKLEIIPASQ |
| | | amino acid sequence | | FCPRVEIIATMKKKGEKRCLNPESKAIKNLLK |
| | | | | AVSKERSKRSP |
| 340 | Human | IGHG | WT human | |
| | WT | 1*01 | IgG1 amino | FPEPVTVSWNSGALTSGVHTFPAVLQSSGLYS |
| | IgG1 | & | acid | LSSVVTVPSSSLGTQTYICNVNHKPSNTKVDK |
| | constant | IGHG | sequence | KVEPKSCDKTHTCPPCPAPELLGGPSVFLFPP |
| | region | 1*02 | | KPKDTLMISRTPEVTCVVVDVSHEDPEVKFN |
| | | & | | WYVDGVEVHNAKTKPREEQYNSTYRVVSVL |
| | | IGHG | | TVLHQDWLNGKEYKCKVSNKALPAPIEKTIS |
| | | 1*05 | | KAKGQPREPQVYTLPPSRDELTKNQVSLTCL |
| | | (IgG1) | | VKGFYPSDIAVEWESNGQPENNYKTTPPVLD |
| | | | | SDGSFFLYSKLTVDKSRWQQGNVFSCSVMHE |
| | | | | ALHNHYTQKSLSLSPGK |
| 341 | | | WT human | |
| | | | IgG1 | CTGGCCCCTTCCAGCAAGTCCACCTCTGGC |
| | | | nucleic acid | GGAACAGCCGCTCTGGGCTGCCTCGTGAAG |
| | | | sequence | GACTACTTCCCCGAGCCTGTGACCGTGTCCT |
| | | | | GGAACTCTGGCGCTCTGACCAGCGGAGTGC |
| | | | | ACACCTTCCCTGCTGTGCTGCAGTCCTCCGG |
| | | | | CCTGTACTCCCTGTCCTCCGTCGTGACCGTG |
| | | | | CCTTCCAGCTCTCTGGGCACCCAGACCTAC |
| | | | | ATCTGCAACGTGAACCACAAGCCCTCCAAC |
| | | | | ACCAAGGTGGACAAGAAGGTGGAACCCAA |
| | | | | GTCCTGCGACAAGACCCACACCTGTCCCCC |
| | | | | TTGTCCTGCCCCTGAACTGCTGGGCGGACC |
| | | | | TTCCGTGTTCCTGTTCCCCCCAAAGCCCAAG |
| | | | | GACACCCTGATGATCTCCCGGACCCCCGAA |
| | | | | GTGACCTGCGTGGTGGTGGATGTGTCCCAC |
| | | | | GAGGACCCTGAAGTGAAGTTCAATTGGTAC |
| | | | | GTGGACGGCGTGGAAGTGCACAACGCCAA |
| | | | | GACCAAGCCTAGAGAGGAACAGTACAACT |
| | | | | CCACCTACCGGGTGGTGTCCGTGCTGACCG |
| | | | | TGCTGCACCAGGATTGGCTGAACGGCAAAG |
| | | | | AGTACAAGTGCAAGGTGTCCAACAAGGCCC |
| | | | | TGCCTGCCCCCATCGAAAAGACCATCTCCA |
| | | | | AGGCCAAGGGCCAGCCCCGGGAACCCCAG |
| | | | | GTGTACACACTGCCCCCTAGCAGGGACGAG |
| | | | | CTGACCAAGAACCAGGTGTCCCTGACCTGT |
| | | | | CTCGTGAAAGGCTTCTACCCCTCCGATATC |
| | | | | GCCGTGGAATGGGAGTCCAACGGCCAGCCT |
| | | | | GAGAACAACTACAAGACCACCCCCCCTGTG |
| | | | | CTGGACTCCGACGGCTCATTCTTCCTGTACA |
| | | | | GCAAGCTGACAGTGGACAAGTCCCGGTGGC |
| | | | | AGCAGGGCAACGTGTTCTCCTGCTCCGTGA |
| | | | | TGCACGAGGCCCTGCACAACCACTACACCC |
| | | | | AGAAGTCCCTGTCCCTGAGCCCCGGCAAGT |
| | | | | GATGA |
| 342 | Mutated | | Amino Acid | EVQLVESGGGLVQPGRSLRLSCAASGFTFDD |
| | 1D05- | | sequence of 1D05 | YAMHWVRQAPGKGLEWVSGISWIRTGIGYA |
| | HC | | heavy chain | DSVKGRFTISRDNAKNSLYLQMNSLRAEDTA |
| | mutant 2 | | with V to A | LYYCAKDMKGSGTYGGWFDTWGQGTLVTV |
| | | | and F to S | SSASTKGPSVFPLAPCSRSTSESTAALGCLVK |
| | | | back-mutation | DYFPEPVTVSWNSGALTSGVHTFPAVLQSSG |
| | | | in frame work | LYSLSSVVTVPSSSLGTKTYTCNVDHKPSNTK |
| | | | region to | VDKRVESKYGPPCPPCPAPELAGAPSVFLFPP |
| | | | germline | KPKDTLMISRTPEVTCVVVDVSQEDPEVQFN |
| | | | highlighted | WYVDGVEVHNAKTKPREEQFNSTYRVVSVL |
| | | | with IgG1 | TVLHQDWLNGKEYKCKVSNKGLPSSIEKTIS |
| | | | disabled | KAKGQPREPQVYTLPPSQEEMTKNQVSLTCL |
| | | | (LAGA) | VKGFYPSDIAVEWESNGQPENNYKTTPPVLD |
| | | | constant | SDGSFFLYSRLTVDKSRWQEGNVFSCSVMHE |
| | | | region | ALHNHYTQKSLSLSLGK |

TABLE S2
SEQ ID NOS: 343-538

| SEQ | | | |
|---|---|---|---|
| ID | | | |
| NO: | Name | Description | Sequence |
| 343 | 416E01 | Amino acid | GFTFSNYA |
| | CDRH1 | sequence of CDRH1 | |
| | (IMGT) | of 416E01 using | |
| | | IMGT | |
| 344 | 416E01 | Amino acid | ISFSGGTT |
| | CDRH2 | sequence of CDRH2 | |
| | (IMGT) | of 416E01 using | |
| | | IMGT | |
| 345 | 416E01 | Amino acid | AKDEAPAGATFFDS |
| | CDRH3 | sequence of CDRH3 | |
| | (IMGT) | of 416E01 using | |
| | | IMGT | |
| 346 | 416E01 | Amino acid | NYAMS |
| | CDRH1 | sequence of CDRH1 | |
| | (Kabat) | of 416E01 using | |
| | | Kabat | |
| 347 | 416E01 | Amino acid | AISFSGGTTYYADSVKG |
| | CDRH2 | sequence of CDRH2 | |
| | (Kabat) | of 416E01 using | |
| | | Kabat | |
| 348 | 416E01 | Amino acid | DEAPAGATFFDS |
| | CDRH3 | sequence of CDRH3 | |
| | (Kabat) | of 416E01 using | |
| | | Kabat | |
| 349 | 416E01 | Amino acid | EVQLAESGGGLVQPGGSLRLSCAASGFTFSN |
| | -Heavy | sequence of V_{H} of | YAMSWVRQTPGKGLEWVSAISFSGGTTYY |
| | chain | 416E01 (mutations | ADSVKGRFTISRDNSKNTLYLHMNSLRADD |
| | variable | from germline are | TAVYYCAKDEAPAGATFFDSWGQGTLVTV |
| | region | shown in bold | SS |
| | | letters) | |
| 350 | 416E01 | Nucleic acid | GAAGTGCAACTGGCGGAGTCTGGGGGAG |
| | -Heavy | sequence of V_{H} of | GCTTGGTACAGCCGGGGGGGTCCCTGAGA |
| | chain | 416E01 | CTCTCCTGTGCAGCCTCTGGATTCACCTTT |
| | variable | | AGCAACTATGCCATGAGTTGGGTCCGCCA |
| | region | | GACTCCAGGAAAGGGGCTGGAGTGGGTCT |
| | | | CAGCTATTAGTTTTAGTGGTGGTACTACAT |
| | | | ACTACGCTGACTCCGTGAAGGGCCGGTTC |
| | | | ACCATCTCCAGAGACAATTCCAAGAACAC |
| | | | GCTGTATTTGCACATGAACAGCCTGAGAG |
| | | | CCGATGACACGGCCGTATATTACTGTGCG |
| | | | AAAGATGAGGCACCAGCTGGCGCAACCTT |
| | | | CTTTGACTCCTGGGGCCAGGGAACGCTGG |
| | | | TCACCGTCTCCTCAG |
| 351 | 416E01 | Amino acid | EVQLAESGGGLVQPGGSLRLSCAASGFTFSN |
| | -full | sequence of 416E01 | YAMSWVRQTPGKGLEWVSAISFSGGTTYY |
| | heavy | heavy chain | ADSVKGRFTISRDNSKNTLYLHMNSLRADD |
| | chain | | TAVYYCAKDEAPAGATFFDSWGQGTLVTV |
| | sequence | | SSASTKGPSVFPLAPCSRSTSESTAALGCLVK |
| | | | DYFPEPVTVSWNSGALTSGVHTFPAVLQSS |
| | | | GLYSLSSWTVPSSSLGTKTYTCNVDHKPSN |
| | | | TKVDKRVESKYGPPCPPCPAPEFEGGPSVFL |
| | | | FPPKPKDTLMISRTPEVTCVVVDVSQEDPEV |
| | | | QFNWYVDGVEVHNAKTKPREEQFNSTYRV |
| | | | VSVLTVLHQDWLNGKEYKCKVSNKGLPSSI |
| | | | EKTISKAKGQPREPQVYTLPPSQEEMTKNQV |
| | | | SLTCLVKGFYPSDIAVEWESNGQPENNYKT |
| | | | TPPVLDSDGSFFLYSRLTVDKSRWQEGNVFS |
| | | | CSVMHEALHNHYTQKSLSLSLGK |
| 352 | 416E01 | Nucleic acid | GAAGTGCAACTGGCGGAGTCTGGGGGAG |
| | -full | sequence of 416E01 | GCTTGGTACAGCCGGGGGGGTCCCTGAGA |
| | heavy | heavy chain | CTCTCCTGTGCAGCCTCTGGATTCACCTTT |
| | chain | | AGCAACTATGCCATGAGTTGGGTCCGCCA |
| | sequence | | GACTCCAGGAAAGGGGCTGGAGTGGGTCT |
| | | | CAGCTATTAGTTTTAGTGGTGGTACTACAT |
| | | | ACTACGCTGACTCCGTGAAGGGCCGGTTC |
| | | | ACCATCTCCAGAGACAATTCCAAGAACAC |
| | | | GCTGTATTTGCACATGAACAGCCTGAGAG |
| | | | CCGATGACACGGCCGTATATTACTGTGCG |
| | | | AAAGATGAGGCACCAGCTGGCGCAACCTT |
| | | | CTTTGACTCCTGGGGCCAGGGAACGCTGG |
| | | | TCACCGTCTCCTCAGCCAGCACCAAGGGC |
| | | | CCTTCCGTGTTCCCCCTGGCCCCTTGCAGC |
| | | | AGGAGCACCTCCGAATCCACAGCTGCCCT |
| | | | GGGCTGTCTGGTGAAGGACTACTTTCCCG |
| | | | AGCCCGTGACCGTGAGCTGGAACAGCGGC |
| | | | GCTCTGACATCCGGCGTCCACACCTTTCCT |
| | | | GCCGTCCTGCAGTCCTCCGGCCTCTACTCC |
| | | | CTGTCCTCCGTGGTGACCGTGCCTAGCTCC |
| | | | TCCCTCGGCACCAAGACCTACACCTGTAA |
| | | | CGTGGACCACAAACCCTCCAACACCAAGG |
| | | | TGGACAAACGGGTCGAGAGCAAGTACGG |
| | | | CCCTCCCTGCCCTCCTTGTCCTGCCCCCGA |
| | | | GTTCGAAGGCGGACCCAGCGTGTTCCTGT |
| | | | TCCCTCCTAAGCCCAAGGACACCCTCATG |
| | | | ATCAGCCGGACACCCGAGGTGACCTGCGT |
| | | | GGTGGTGGATGTGAGCCAGGAGGACCCTG |
| | | | AGGTCCAGTTCAACTGGTATGTGGATGGC |
| | | | GTGGAGGTGCACAACGCCAAGACAAAGC |
| | | | CCCGGGAAGAGCAGTTCAACTCCACCTAC |
| | | | AGGGTGGTCAGCGTGCTGACCGTGCTGCA |
| | | | TCAGGACTGGCTGAACGGCAAGGAGTACA |
| | | | AGTGCAAGGTCAGCAATAAGGGACTGCCC |
| | | | AGCAGCATCGAGAAGACCATCTCCAAGGC |
| | | | TAAAGGCCAGCCCCGGGAACCTCAGGTGT |
| | | | ACACCCTGCCTCCCAGCCAGGAGGAGATG |
| | | | ACCAAGAACCAGGTGAGCCTGACCTGCCT |
| | | | GGTGAAGGGATTCTACCCTTCCGACATCG |
| | | | CCGTGGAGTGGGAGTCCAACGGCCAGCCC |
| | | | GAGAACAATTATAAGACCACCCCTCCCGT |
| | | | CCTCGACAGCGACGGATCCTTCTTTCTGTA |
| | | | CTCCAGGCTGACCGTGGATAAGTCCAGGT |
| | | | GGCAGGAAGGCAACGTGTTCAGCTGCTCC |
| | | | GTGATGCACGAGGCCCTGCACAATCACTA |
| | | | CACCCAGAAGTCCCTGAGCCTGTCCCTGG |
| | | | GAAAG |
| 353 | 416E01 | Amino acid | QGIRRW |
| | CDRL1 | sequence of CDRL1 | |
| | (IMGT) | of 416E01 using | |
| | | IMGT | |
| 354 | 416E01 | Amino acid | GAS |
| | CDRL2 | sequence of CDRL2 | |
| | (IMGT) | of 416E01 using | |
| | | IMGT | |
| 355 | 416E01 | Amino acid | QQANSFPIT |
| | CDRL3 | sequence of CDRL3 | |
| | (IMGT) | of 416E01 using | |
| | | IMGT | |
| 356 | 416E01 | Amino acid | RASQGIRRWLA |
| | CDRL1 | sequence of CDRL1 | |
| | (Kabat) | of 416E01 using | |
| | | Kabat | |
| 357 | 416E01 | Amino acid | GASSLQS |
| | CDRL2 | sequence of CDRL2 | |
| | (Kabat) | of 416E01 using | |
| | | Kabat | |
| 358 | 416E01 | Amino acid | QQANSFPIT |
| | CDRL3 | sequence of CDRL3 | |
| | (Kabat) | of 416E01 using | |
| | | Kabat | |
| 359 | 416E01 | Amino acid | DIQMTQSPSSVSASVGDRVTITCRASQGIRR |
| | -Light | sequence of V_{L} of | WLAWYQQKPGKAPKLLISGASSLQSGVPSR |
| | chain | 416E01 (mutations | FSGSGSGTDFTLIITSLQPEDFATYYCQQA |
| | variable | from germline are | NSFPITFGQGTRLEIK |
| | region | shown in bold | |
| | | letters) | |
| 360 | 416E01 | Nucleic acid | GACATCCAGATGACCCAGTCTCCATCTTCC |
| | -Light | sequence of V_{L} of | GTGTCTGCATCTGTAGGAGACAGAGTCAC |
| | chain | 416E01 | CATCACTTGTCGGGCGAGTCAGGGTATTA |
| | variable | | GGAGGTGGTTAGCCTGGTATCAGCAGAAA |
| | region | | CCAGGGAAAGCCCCTAAACTCCTGATCTC |
| | | | TGGTGCATCCAGTTTGCAAAGTGGGGTCC |
| | | | CATCAAGGTTCAGCGGCAGTGGATCTGGG |
| | | | ACAGATTTCACTCTCATCATTACCAGTCTG |
| | | | CAGCCTGAAGATTTTGCAACTTACTATTGT |
| | | | CAACAGGCTAACAGTTTCCCGATCACCTT |
| | | | CGGCCAAGGGACACGACTGGAGATCAAA |
| | | | C |
| 361 | 416E01 | Amino acid | DIQMTQSPSSVSASVGDRVTITCRASQGIRR |
| | -full | sequence of 416E01 | WLAWYQQKPGKAPKLLISGASSLQSGVPSRF |
| | light | light chain | SGSGSGTDFTLIITSLQPEDFATYYCQQANS |
| | chain | | FPITFGQGTRLEIKRTVAAPSVFIFPPSDEQ |
| | sequence | | LKSGTASVVCLLNNFYPREAKVQWKVDNALQ |
| | | | SGNSQESVTEQDSKDSTYSLSSTLTLSKADY |
| | | | EKHKVYACEVTHQGLSSPVTKSFNRGEC |
| 362 | 416E01 | Nucleic acid | GACATCCAGATGACCCAGTCTCCATCTTCC |
| | -full | sequence of 416E01 | GTGTCTGCATCTGTAGGAGACAGAGTCAC |
| | light | light chain | CATCACTTGTCGGGCGAGTCAGGGTATTA |
| | chain | | GGAGGTGGTTAGCCTGGTATCAGCAGAAA |
| | sequence | | CCAGGGAAAGCCCCTAAACTCCTGATCTC |
| | | | TGGTGCATCCAGTTTGCAAAGTGGGGTCC |
| | | | CATCAAGGTTCAGCGGCAGTGGATCTGGG |
| | | | ACAGATTTCACTCTCATCATTACCAGTCTG |
| | | | CAGCCTGAAGATTTTGCAACTTACTATTGT |
| | | | CAACAGGCTAACAGTTTCCCGATCACCTT |
| | | | CGGCCAAGGGACACGACTGGAGATCAAA |
| | | | CGTACGGTGGCCGCTCCCTCCGTGTTCATC |
| | | | TTCCCACCTTCCGACGAGCAGCTGAAGTC |
| | | | CGGCACCGCTTCTGTCGTGTGCCTGCTGAA |
| | | | CAACTTCTACCCCCGCGAGGCCAAGGTGC |
| | | | AGTGGAAGGTGGACAACGCCCTGCAGTCC |
| | | | GGCAACTCCCAGGAATCCGTGACCGAGCA |
| | | | GGACTCCAAGGACAGCACCTACTCCCTGT |
| | | | CCTCCACCCTGACCCTGTCCAAGGCCGAC |
| | | | TACGAGAAGCACAAGGTGTACGCCTGCGA |
| | | | AGTGACCCACCAGGGCCTGTCTAGCCCCG |
| | | | TGACCAAGTCTTTCAACCGGGGCGAGTGT |
| 363 | STIM00 | Amino acid | GYTFSTFG |
| | 1- | sequence of CDRH1 | |
| | CDRH1 | of STIM001 using | |
| | | IMGT | |
| 364 | STIM00 | Amino acid | ISAYNGDT |
| | 1- | sequence of CDRH2 | |
| | CDRH2 | of STIM001 using | |
| | | IMGT | |
| 365 | STIM00 | Amino acid | ARSSGHYYYYGMDV |
| | 1- | sequence of CDRH3 | |
| | CDRH3 | of STIM001 using | |
| | | IMGT | |
| 366 | STIM00 | Amino acid | QVQVVQSGAEVKKPGASVKVSCKASGYTFS |
| | 1- | sequence of V_{H} of | TFGITWVRQAPGQGLEWMGWISAYNGDTN |
| | Heavy | STIM001 | YAQNLQGRVIMTTDTSTSTAYMELRSLRSD |
| | chain | | DTAVYYCARSSGHYYYYGMDVWGQGTTV |
| | variable | | TVSS |
| | region | | |
| 367 | STIM00 | Nucleic acid | CAGGTTCAGGTGGTGCAGTCTGGAGCTGA |
| | 1- | sequence of V_{H} of | GGTGAAGAAGCCTGGGGCCTCAGTGAAGG |
| | Heavy | STIM001 | TCTCCTGCAAGGCTTCTGGTTACACCTTTT |
| | chain | | CCACCTTTGGTATCACCTGGGTGCGACAG |
| | variable | | GCCCCTGGACAAGGGCTTGAATGGATGGG |
| | region | | ATGGATCAGCGCTTACAATGGTGACACAA |
| | | | ACTATGCACAGAATCTCCAGGGCAGAGTC |
| | | | ATCATGACCACAGACACATCCACGAGCAC |
| | | | AGCCTACATGGAGCTGAGGAGCCTGAGAT |
| | | | CTGACGACACGGCCGTTTATTACTGTGCG |
| | | | AGGAGCAGTGGCCACTACTACTACTACGG |
| | | | TATGGACGTCTGGGGCCAAGGGACCACGG |
| | | | TCACCGTCTCCTCA |
| 368 | STIM00 | Amino acid | QVQVVQSGAEVKKPGASVKVSCKASGYTFS |
| | 1-full | sequence of | TFGITWVRQAPGQGLEWMGWISAYNGDTN |
| | heavy | STIM001 heavy | YAQNLQGRVIMTTDTSTSTAYMELRSLRSD |
| | chain | chain | DTAVYYCARSSGHYYYYGMDVWGQGTTVTV |
| | sequence | | SSASTKGPSVFPLAPSSKSTSGGTAALGC |
| | | | LVKDYFPEPVTVSWNSGALTSGVHTFPAVL |
| | | | QSSGLYSLSSVVTVPSSSLGTQTYICNVNHK |
| | | | PSNTKVDKKVEPKSCDKTHTCPPCPAPELLG |
| | | | GPSVFLFPPKPKDTLMISRTPEVTCVVVDVS |
| | | | HEDPEVKFNWYVDGVEVHNAKTKPREEQY |
| | | | NSTYRVVSVLTVLHQDWLNGKEYKCKVSNKA |
| | | | LPAPIEKTISKAKGQPREPQVYTLPPSRDE |
| | | | LTKNQVSLTCLVKGFYPSDIAVEWESNGQP |
| | | | ENNYKTTPPVLDSDGSFFLYSKLTVDKSRW |
| | | | QQGNVFSCSVMHEALHNHYTQKSLSLSPGK |
| 369 | STIM00 | Nucleic acid | CAGGTTCAGGTGGTGCAGTCTGGAGCTGA |
| | 1-full | sequence of | GGTGAAGAAGCCTGGGGCCTCAGTGAAGG |
| | heavy | STIM001 heavy | TCTCCTGCAAGGCTTCTGGTTACACCTTTT |
| | chain | chain | CCACCTTTGGTATCACCTGGGTGCGACAG |
| | sequence | | GCCCCTGGACAAGGGCTTGAATGGATGGG |
| | | | ATGGATCAGCGCTTACAATGGTGACACAA |
| | | | ACTATGCACAGAATCTCCAGGGCAGAGTC |
| | | | ATCATGACCACAGACACATCCACGAGCAC |
| | | | AGCCTACATGGAGCTGAGGAGCCTGAGAT |
| | | | CTGACGACACGGCCGTTTATTACTGTGCG |
| | | | AGGAGCAGTGGCCACTACTACTACTACGG |
| | | | TATGGACGTCTGGGGCCAAGGGACCACGG |
| | | | TCACCGTCTCCTCAGCCAGCACCAAGGGC |
| | | | CCCTCTGTGTTCCCTCTGGCCCCTTCCAGC |
| | | | AAGTCCACCTCTGGCGGAACAGCCGCTCT |
| | | | GGGCTGCCTCGTGAAGGACTACTTCCCCG |
| | | | AGCCTGTGACCGTGTCCTGGAACTCTGGC |
| | | | GCTCTGACCAGCGGAGTGCACACCTTCCC |
| | | | TGCTGTGCTGCAGTCCTCCGGCCTGTACTC |
| | | | CCTGTCCTCCGTCGTGACCGTGCCTTCCAG |
| | | | CTCTCTGGGCACCCAGACCTACATCTGCA |
| | | | ACGTGAACCACAAGCCCTCCAACACCAAG |
| | | | GTGGACAAGAAGGTGGAACCCAAGTCCTG |
| | | | CGACAAGACCCACACCTGTCCCCCTTGTC |
| | | | CTGCCCCTGAACTGCTGGGCGGACCTTCC |
| | | | GTGTTCCTGTTCCCCCCAAAGCCCAAGGA |
| | | | CACCCTGATGATCTCCCGGACCCCCGAAG |
| | | | TGACCTGCGTGGTGGTGGATGTGTCCCAC |
| | | | GAGGACCCTGAAGTGAAGTTCAATTGGTA |
| | | | CGTGGACGGCGTGGAAGTGCACAACGCCA |
| | | | AGACCAAGCCTAGAGAGGAACAGTACAA |
| | | | CTCCACCTACCGGGTGGTGTCCGTGCTGA |
| | | | CCGTGCTGCACCAGGATTGGCTGAACGGC |
| | | | AAAGAGTACAAGTGCAAGGTGTCCAACAA |
| | | | GGCCCTGCCTGCCCCCATCGAAAAGACCA |
| | | | TCTCCAAGGCCAAGGGCCAGCCCCGGGAA |
| | | | CCCCAGGTGTACACACTGCCCCCTAGCAG |
| | | | GGACGAGCTGACCAAGAACCAGGTGTCCC |
| | | | TGACCTGTCTCGTGAAAGGCTTCTACCCCT |
| | | | CCGATATCGCCGTGGAATGGGAGTCCAAC |
| | | | GGCCAGCCTGAGAACAACTACAAGACCAC |
| | | | CCCCCCTGTGCTGGACTCCGACGGCTCATT |
| | | | CTTCCTGTACAGCAAGCTGACAGTGGACA |
| | | | AGTCCCGGTGGCAGCAGGGCAACGTGTTC |
| | | | TCCTGCTCCGTGATGCACGAGGCCCTGCA |
| | | | CAACCACTACACCCAGAAGTCCCTGTCCC |
| | | | TGAGCCCCGGCAAGTGATGA |
| 370 | STIM00 | Amino acid | QSLLHSNEYNY |
| | 1- | sequence of CDRL1 | |
| | CDRL1 | of STIM001 using | |
| | | IMGT | |
| 371 | STIM00 | Amino acid | LGS |
| | 1- | sequence of CDRL2 | |
| | CDRL2 | of STIM001 using | |
| | | IMGT | |
| 372 | STIM00 | Amino acid | MQSLQTPLT |
| | 1- | sequence of CDRL3 | |
| | CDRL3 | of STIM001 using | |
| | | IMGT | |
| 373 | STIM00 | Amino acid | DIVMTQSPLSLPVTPGEPASISCRSSQSLLH |
| | 1-Light | sequence of V_{L} of | SNEYNYLDWYLQKPGQSPQLLIFLGSNRASG |
| | chain | STIM001 | VPDRFSGSGSGTDFTLKITRVEAEDVGIYYC |
| | variable | | MQSLQTPLTFGGGTKVEIK |
| | region | | |
| 374 | STIM00 | Nucleic acid | GATATTGTGATGACTCAGTCTCCACTCTCC |
| | 1-Light | sequence of V_{L} of | CTGCCCGTCACCCCTGGAGAGCCGGCCTC |
| | chain | STIM001 | CATCTCCTGCAGGTCTAGTCAGAGCCTCCT |
| | variable | | GCATAGTAATGAATACAACTATTTGGATT |
| | region | | GGTACCTGCAGAAGCCAGGGCAGTCTCCA |
| | | | CAGCTCCTGATCTTTTTGGGTTCTAATCGG |
| | | | GCCTCCGGGGTCCCTGACAGGTTCAGTGG |
| | | | CAGTGGATCAGGCACAGATTTTACACTGA |
| | | | AAATCACCAGAGTGGAGGCTGAGGATGTT |
| | | | GGAATTTATTACTGCATGCAATCTCTACAA |
| | | | ACTCCGCTCACTTTCGGCGGAGGGACCAA |
| | | | GGTGGAGATCAAA |
| 375 | STIM00 | Amino acid | DIVMTQSPLSLPVTPGEPASISCRSSQSLLH |
| | 1-full | sequence of | SNEYNYLDWYLQKPGQSPQLLIFLGSNRASG |
| | light | STIM001 light chain | VPDRFSGSGSGTDFTLKITRVEAEDVGIYYC |
| | chain | | MQSLQTPLTFGGGTKVEIK |
| | sequence | | RTVAAPSVFIFPPSDEQLKSGTASVVCLLNN |
| | | | FYPREAKVQWKVDNALQSGNSQESVTEQD |
| | | | SKDSTYSLSSTLTLSKADYEKHKVYACEVT |
| | | | HQGLSSPVTKSFNRGEC |
| 376 | STIM00 | Nucleic acid | GATATTGTGATGACTCAGTCTCCACTCTCC |
| | 1-full | sequence of | CTGCCCGTCACCCCTGGAGAGCCGGCCTC |
| | light | STIM001 light chain | CATCTCCTGCAGGTCTAGTCAGAGCCTCCT |
| | chain | | GCATAGTAATGAATACAACTATTTGGATT |
| | sequence | | GGTACCTGCAGAAGCCAGGGCAGTCTCCA |
| | | | CAGCTCCTGATCTTTTTGGGTTCTAATCGG |
| | | | GCCTCCGGGGTCCCTGACAGGTTCAGTGG |
| | | | CAGTGGATCAGGCACAGATTTTACACTGA |
| | | | AAATCACCAGAGTGGAGGCTGAGGATGTT |
| | | | GGAATTTATTACTGCATGCAATCTCTACAA |
| | | | ACTCCGCTCACTTTCGGCGGAGGGACCAA |
| | | | GGTGGAGATCAAAcgtacggtggccgctcc |
| | | | cctccgtgttatcttcccaccttccgacga |
| | | | gcagctgaagtccggcaccgcttctgtcgt |
| | | | gtgcctgctgaacaacttctacccccgcga |
| | | | ggccaaggtgcagtggaaggtggacaacgc |
| | | | cctgcagtccggcaactcccaggaatccgt |
| | | | gaccgagcaggactccaaggacagcaccta |
| | | | ctccctgtcctccaccctgaccctgtccaa |
| | | | ggccgactacgagaagcacaaggtgtacgc |
| | | | ctgcgaagtgacccaccagggcctgtctag |
| | | | ccccgtgaccaagtctttcaaccggggcga |
| | | | gtgt |
| 377 | STIM00 | Amino acid | GYTFTSYG |
| | 2- | sequence of CDRH1 | |
| | CDRH1 | of STIM002 using | |
| | | IMGT | |
| 378 | STIM00 | Amino acid | ISAYNGNT |
| | 2- | sequence of CDRH2 | |
| | CDRH2 | of STIM002 using | |
| | | IMGT | |
| 379 | STIM00 | Amino acid | ARSTYFYGSGTLYGMDV |
| | 2- | sequence of CDRH3 | |
| | CDRH3 | of STIM002 using | |
| | | IMGT | |
| 380 | STIM00 | Amino acid | QVQLVQSGGEVKKPGASVKVSCKASGYTFT |
| | 2- | sequence of V_{H} of | SYGFSWVRQAPGQGLEWMGWISAYNGNTN |
| | Heavy | STIM002 | YAQKLQGRVTMTTDTSTSTAYMELRSLRSD |
| | chain | | DTAVYYCARSTYFYGSGTLYGMDVWGQGT |
| | variable | | TVTVSS |
| | region | | |
| 381 | STIM00 | Nucleic acid | CAGGTTCAACTGGTGCAGTCTGGAGGTGA |
| | 2- | sequence of V_{H} of | GGTGAAGAAGCCTGGGGCCTCAGTGAAGG |
| | Heavy | STIM002 | TCTCCTGCAAGGCTTCTGGTTACACCTTTA |
| | chain | | CCAGCTATGGTTTCAGCTGGGTGCGACAG |
| | variable | | GCCCCTGGACAAGGACTAGAGTGGATGGG |
| | region | | ATGGATCAGCGCTTACAATGGTAACACAA |
| | | | ACTATGCACAGAAGCTCCAGGGCAGAGTC |
| | | | ACCATGACCACAGACACATCCACGAGCAC |
| | | | AGCCTACATGGAGCTGAGGAGCTTGAGAT |
| | | | CTGACGACACGGCCGTGTATTACTGTGCG |
| | | | AGATCTACGTATTTCTATGGTTCGGGGACC |
| | | | CTCTACGGTATGGACGTCTGGGGCCAAGG |
| | | | GACCACGGTCACCGTCTCCTCA |
| 382 | STIM00 | Amino acid | QVQLVQSGGEVKKPGASVKVSCKASGYTFT |
| | 2-full | sequence of | SYGFSWVRQAPGQGLEWMGWISAYNGNTN |
| | heavy | STIM002 heavy | YAQKLQGRVTMTTDTSTSTAYMELRSLRSD |
| | chain | chain | DTAVYYCARSTYFYGSGTLYGMDVWGQGT |
| | sequence | | TVTVSSASTKGPSVFPLAPSSKSTSGGTAAL |
| | | | GCLVKDYFPEPVTVSWNSGALTSGVHTFPA |
| | | | VLQSSGLYSLSSVVTVPSSSLGTQTYICNVN |
| | | | HKPSNTKVDKKVEPKSCDKTHTCPPCPAPEL |
| | | | LGGPSVFLFPPKPKDTLMISRTPEVTCVVVD |
| | | | VSHEDPEVKFNWYVDGVEVHNAKTKPREE |
| | | | QYNSTYRVVSVLTVLHQDWLNGKEYKCKV |
| | | | SNKALPAPIEKTISKAKGQPREPQVYTLPPSR |
| | | | DELTKNQVSLTCLVKGFYPSDIAVEWESNG |
| | | | QPENNYKTTPPVLDSDGSFFLYSKLTVDKSR |
| | | | WQQGNVFSCSVMHEALHNHYTQKSLSLSP |
| | | | GK |
| 383 | STIM00 | Nucleic acid | CAGGTTCAACTGGTGCAGTCTGGAGGTGA |
| | 2-full | sequence of | GGTGAAGAAGCCTGGGGCCTCAGTGAAGG |
| | heavy | STIM002 heavy | TCTCCTGCAAGGCTTCTGGTTACACCTTTA |
| | chain | chain | CCAGCTATGGTTTCAGCTGGGTGCGACAG |
| | sequence | | GCCCCTGGACAAGGACTAGAGTGGATGGG |
| | | | ATGGATCAGCGCTTACAATGGTAACACAA |
| | | | ACTATGCACAGAAGCTCCAGGGCAGAGTC |
| | | | ACCATGACCACAGACACATCCACGAGCAC |
| | | | AGCCTACATGGAGCTGAGGAGCTTGAGAT |
| | | | CTGACGACACGGCCGTGTATTACTGTGCG |
| | | | AGATCTACGTATTTCTATGGTTCGGGGACC |
| | | | CTCTACGGTATGGACGTCTGGGGCCAAGG |
| | | | GACCACGGTCACCGTCTCCTCA |
| | | | GCCAGCACCAAGGGCCCCTCTGTGTTCCC |
| | | | TCTGGCCCCTTCCAGCAAGTCCACCTCTGG |
| | | | CGGAACAGCCGCTCTGGGCTGCCTCGTGA |
| | | | AGGACTACTTCCCCGAGCCTGTGACCGTG |
| | | | TCCTGGAACTCTGGCGCTCTGACCAGCGG |
| | | | AGTGCACACCTTCCCTGCTGTGCTGCAGTC |
| | | | CTCCGGCCTGTACTCCCTGTCCTCCGTCGT |
| | | | GACCGTGCCTTCCAGCTCTCTGGGCACCC |
| | | | AGACCTACATCTGCAACGTGAACCACAAG |
| | | | CCCTCCAACACCAAGGTGGACAAGAAGGT |
| | | | GGAACCCAAGTCCTGCGACAAGACCCACA |
| | | | CCTGTCCCCCTTGTCCTGCCCCTGAACTGC |
| | | | TGGGCGGACCTTCCGTGTTCCTGTTCCCCC |
| | | | CAAAGCCCAAGGACACCCTGATGATCTCC |
| | | | CGGACCCCCGAAGTGACCTGCGTGGTGGT |
| | | | GGATGTGTCCCACGAGGACCCTGAAGTGA |
| | | | AGTTCAATTGGTACGTGGACGGCGTGGAA |
| | | | GTGCACAACGCCAAGACCAAGCCTAGAGA |
| | | | GGAACAGTACAACTCCACCTACCGGGTGG |
| | | | TGTCCGTGCTGACCGTGCTGCACCAGGAT |
| | | | TGGCTGAACGGCAAAGAGTACAAGTGCAA |
| | | | GGTGTCCAACAAGGCCCTGCCTGCCCCCA |
| | | | TCGAAAAGACCATCTCCAAGGCCAAGGGC |
| | | | CAGCCCCGGGAACCCCAGGTGTACACACT |
| | | | GCCCCCTAGCAGGGACGAGCTGACCAAGA |
| | | | ACCAGGTGTCCCTGACCTGTCTCGTGAAA |
| | | | GGCTTCTACCCCTCCGATATCGCCGTGGA |
| | | | ATGGGAGTCCAACGGCCAGCCTGAGAACA |
| | | | ACTACAAGACCACCCCCCCTGTGCTGGAC |
| | | | TCCGACGGCTCATTCTTCCTGTACAGCAAG |
| | | | CTGACAGTGGACAAGTCCCGGTGGCAGCA |
| | | | GGGCAACGTGTTCTCCTGCTCCGTGATGC |
| | | | ACGAGGCCCTGCACAACCACTACACCCAG |
| | | | AAGTCCCTGTCCCTGAGCCCCGGCAAGTG |
| | | | ATGA |
| 384 | STIM00 | Amino acid | QSLLHSDGYNY |
| | 2- | sequence of CDRL1 | |
| | CDRL1 | of STIM002 using | |
| | | IMGT | |
| 385 | STIM00 | Amino acid | LGS |
| | 2- | sequence of CDRL2 | |
| | CDRL2 | of STIM002 using | |
| | | IMGT | |
| 386 | STIM00 | Amino acid | MQALQTPLS |
| | 2- | sequence of CDRL3 | |
| | CDRL3 | of STIM002 using | |
| | | IMGT | |
| 387 | STIM00 | Amino acid | DIVMTQSPLSLPVTPGEPASISCRSSQSLLHS |
| | 2-Light | sequence of V_{L} of | DGYNYLDWYLQKPGQSPQLLIYLGSTRASG |
| | chain | STIM002 | FPDRFSGSGSGTDFTLKISRVEAEDVGVYYC |
| | variable | | MQALQTPLSFGQGTKLEIK |
| | region | | |
| 388 | STIM00 | Nucleic acid | GATATTGTGATGACTCAGTCTCCACTCTCC |
| | 2-Light | sequence of V_{L} of | CTGCCCGTCACCCCTGGAGAGCCGGCCTC |
| | chain | STIM002 | CATCTCCTGCAGGTCTAGTCAGAGCCTCCT |
| | variable | | GCATAGTGATGGATACAACTGTTTGGATT |
| | region | | GGTACCTGCAGAAGCCAGGGCAGTCTCCA |
| | | | CAGCTCCTGATCTATTTGGGTTCTACTCGG |
| | | | GCCTCCGGGTTCCCTGACAGGTTCAGTGG |
| | | | CAGTGGATCAGGCACAGATTTTACACTGA |
| | | | AAATCAGCAGAGTGGAGGCTGAGGATGTT |
| | | | GGGGTTTATTACTGCATGCAAGCTCTACA |
| | | | AACTCCGTGCAGTTTTGGCCAGGGGACCA |
| | | | AGCTGGAGATCAAA |
| 389 | STIM00 | Amino acid | DIVMTQSPLSLPVTPGEPASISCRSSQSLLHS |
| | 2-full | sequence of | DGYNYLDWYLQKPGQSPQLLIYLGSTRASG |
| | light | STIM002 light chain | FPDRFSGSGSGTDFTLKISRVEAEDVGVYYC |
| | chain | | MQALQTPLSFGQGTKLEIK |
| | sequence | | RTVAAPSVFIFPPSDEQLKSGTASVVCLLNN |
| | | | FYPREAKVQWKVDNALQSGNSQESVTEQD |
| | | | SKDSTYSLSSTLTLSKADYEKHKVYACEVT |
| | | | HQGLSSPVTKSFNRGEC |
| 390 | STIM00 | Nucleic acid | GATATTGTGATGACTCAGTCTCCACTCTCC |
| | 2-full | sequence of | CTGCCCGTCACCCCTGGAGAGCCGGCCTC |
| | light | STIM002 light chain | CATCTCCTGCAGGTCTAGTCAGAGCCTCCT |
| | chain | | GCATAGTGATGGATACAACTGTTTGGATT |
| | sequence | | GGTACCTGCAGAAGCCAGGGCAGTCTCCA |
| | | | CAGCTCCTGATCTATTTGGGTTCTACTCGG |
| | | | GCCTCCGGGTTCCCTGACAGGTTCAGTGG |
| | | | CAGTGGATCAGGCACAGATTTTACACTGA |
| | | | AAATCAGCAGAGTGGAGGCTGAGGATGTT |
| | | | GGGGTTTATTACTGCATGCAAGCTCTACA |
| | | | AACTCCGTGCAGTTTTGGCCAGGGGACCA |
| | | | AGCTGGAGATCAAAcgtacggtggccgctcc |
| | | | ctccgtgttcatcttcccaccttccgacgag |
| | | | cagctgaagtccggcaccgcttctgtcgtgt |
| | | | gcctgctgaacaacttctacccccgcgaggcc |
| | | | aaggtgcagtggaaggtggacaacgccctgca |
| | | | gtccggcaactcccaggaatccgtgaccgagc |
| | | | aggactccaaggacagcacctactccctgtcc |
| | | | tccaccctgaccctgtccaaggccgactacga |
| | | | gaagcacaaggtgtacgcctgcgaagtgaccc |
| | | | accagggcctgtctagccccgtgaccaagtct |
| | | | ttcaaccggggcgagtgt |
| 391 | STIM00 | Amino acid | GYTFTSYG |
| | 2-B- | sequence of CDRH1 | |
| | CDRH1 | of STIM002-B using | |
| | | IMGT | |
| 392 | STIM00 | Amino acid | ISAYNGNT |
| | 2-B- | sequence of CDRH2 | |
| | CDRH2 | of STIM002-B using | |
| | | IMGT | |
| 393 | STIM00 | Amino acid | ARSTYFYGSGTLYGMDV |
| | 2-B- | sequence of CDRH3 | |
| | CDRH3 | of STIM002-B using | |
| | | IMGT | |
| 394 | STIM00 | Amino acid | QVQLVQSGGEVKKPGASVKVSCKASGYTFT |
| | 2-B- | sequence of V_{H} of | SYGFSWVRQAPGQGLEWMGWISAYNGNTN |
| | Heavy | STIM002-B | YAQKLQGRVTMTTDTSTSTAYMELRSLRSD |
| | chain | | DTAVYYCARSTYFYGSGTLYGMDVWGQGT |
| | variable | | TVTVSS |
| | region | | |
| 395 | STIM00 | Nucleic acid | CAGGTTCAACTGGTGCAGTCTGGAGGTGA |
| | 2-B- | sequence of V_{H} of | GGTGAAGAAGCCTGGGGCCTCAGTGAAGG |
| | Heavy | STIM002-B | TCTCCTGCAAGGCTTCTGGTTACACCTTTA |
| | chain | | CCAGCTATGGTTTCAGCTGGGTGCGACAG |
| | variable | | GCCCCTGGACAAGGACTAGAGTGGATGGG |
| | region | | ATGGATCAGCGCTTACAATGGTAACACAA |
| | | | ACTATGCACAGAAGCTCCAGGGCAGAGTC |
| | | | ACCATGACCACAGACACATCCACGAGCAC |
| | | | AGCCTACATGGAGCTGAGGAGCTTGAGAT |
| | | | CTGACGACACGGCCGTGTATTACTGTGCG |
| | | | AGATCTACGTATTTCTATGGTTCGGGGACC |
| | | | CTCTACGGTATGGACGTCTGGGGCCAAGG |
| | | | GACCACGGTCACCGTCTCCTCA |
| 396 | STIM00 | Amino acid | QVQLVQSGGEVKKPGASVKVSCKASGYTFT |
| | 2-B- | sequence of | SYGFSWVRQAPGQGLEWMGWISAYNGNTN |
| | full | STIM002-B heavy | YAQKLQGRVTMTTDTSTSTAYMELRSLRSD |
| | heavy | chain | DTAVYYCARSTYFYGSGTLYGMDVWGQGT |
| | chain | | TVTVSSASTKGPSVFPLAPSSKSTSGGTAAL |
| | sequence | | GCLVKDYFPEPVTVSWNSGALTSGVHTFPA |
| | | | VLQSSGLYSLSSVVTVPSSSLGTQTYICNVN |
| | | | HKPSNTKVDKKVEPKSCDKTHTCPPCPAPEL |
| | | | LGGPSVFLFPPKPKDTLMISRTPEVTCVVVD |
| | | | VSHEDPEVKFNWYVDGVEVHNAKTKPREE |
| | | | QYNSTYRVVSVLTVLHQDWLNGKEYKCKV |
| | | | SNKALPAPIEKTISKAKGQPREPQVYTLPPSR |
| | | | DELTKNQVSLTCLVKGFYPSDIAVEWESNG |
| | | | QPENNYKTTPPVLDSDGSFFLYSKLTVDKSR |
| | | | WQQGNVFSCSVMHEALHNHYTQKSLSLSP |
| | | | GK |
| 397 | STIM00 | Nucleic acid | CAGGTTCAACTGGTGCAGTCTGGAGGTGA |
| | 2-B- | sequence of | GGTGAAGAAGCCTGGGGCCTCAGTGAAGG |
| | full | STIM002-B heavy | TCTCCTGCAAGGCTTCTGGTTACACCTTTA |
| | heavy | chain | CCAGCTATGGTTTCAGCTGGGTGCGACAG |
| | chain | | GCCCCTGGACAAGGACTAGAGTGGATGGG |
| | sequence | | ATGGATCAGCGCTTACAATGGTAACACAA |
| | | | ACTATGCACAGAAGCTCCAGGGCAGAGTC |
| | | | ACCATGACCACAGACACATCCACGAGCAC |
| | | | AGCCTACATGGAGCTGAGGAGCTTGAGAT |
| | | | CTGACGACACGGCCGTGTATTACTGTGCG |
| | | | AGATCTACGTATTTCTATGGTTCGGGGACC |
| | | | CTCTACGGTATGGACGTCTGGGGCCAAGG |
| | | | GACCACGGTCACCGTCTCCTCAGCCAGCA |
| | | | CCAAGGGCCCCTCTGTGTTCCCTCTGGCCC |
| | | | CTTCCAGCAAGTCCACCTCTGGCGGAACA |
| | | | GCCGCTCTGGGCTGCCTCGTGAAGGACTA |
| | | | CTTCCCCGAGCCTGTGACCGTGTCCTGGA |
| | | | ACTCTGGCGCTCTGACCAGCGGAGTGCAC |
| | | | ACCTTCCCTGCTGTGCTGCAGTCCTCCGGC |
| | | | CTGTACTCCCTGTCCTCCGTCGTGACCGTG |
| | | | CCTTCCAGCTCTCTGGGCACCCAGACCTAC |
| | | | ATCTGCAACGTGAACCACAAGCCCTCCAA |
| | | | CACCAAGGTGGACAAGAAGGTGGAACCC |
| | | | AAGTCCTGCGACAAGACCCACACCTGTCC |
| | | | CCCTTGTCCTGCCCCTGAACTGCTGGGCGG |
| | | | ACCTTCCGTGTTCCTGTTCCCCCCAAAGCC |
| | | | CAAGGACACCCTGATGATCTCCCGGACCC |
| | | | CCGAAGTGACCTGCGTGGTGGTGGATGTG |
| | | | TCCCACGAGGACCCTGAAGTGAAGTTCAA |
| | | | TTGGTACGTGGACGGCGTGGAAGTGCACA |
| | | | ACGCCAAGACCAAGCCTAGAGAGGAACA |
| | | | GTACAACTCCACCTACCGGGTGGTGTCCG |
| | | | TGCTGACCGTGCTGCACCAGGATTGGCTG |
| | | | AACGGCAAAGAGTACAAGTGCAAGGTGTC |
| | | | CAACAAGGCCCTGCCTGCCCCCATCGAAA |
| | | | AGACCATCTCCAAGGCCAAGGGCCAGCCC |
| | | | CGGGAACCCCAGGTGTACACACTGCCCCC |
| | | | TAGCAGGGACGAGCTGACCAAGAACCAG |
| | | | GTGTCCCTGACCTGTCTCGTGAAAGGCTTC |
| | | | TACCCCTCCGATATCGCCGTGGAATGGGA |
| | | | GTCCAACGGCCAGCCTGAGAACAACTACA |
| | | | AGACCACCCCCCCTGTGCTGGACTCCGAC |
| | | | GGCTCATTCTTCCTGTACAGCAAGCTGAC |
| | | | AGTGGACAAGTCCCGGTGGCAGCAGGGCA |
| | | | ACGTGTTCTCCTGCTCCGTGATGCACGAG |
| | | | GCCCTGCACAACCACTACACCCAGAAGTC |
| | | | CCTGTCCCTGAGCCCCGGCAAGTGATGA |
| 398 | STIM00 | Amino acid | QSLLHSDGYNC |
| | 2-B- | sequence of CDRL1 | |
| | CDRL1 | of STIM002-B using | |
| | | IMGT | |
| 399 | STIM00 | Amino acid | LGS |
| | 2-B- | sequence of CDRL2 | |
| | CDRL2 | of STIM002-B using | |
| | | IMGT | |
| 400 | STIM00 | Amino acid | MQALQTPCS |
| | 2-B- | sequence of CDRL3 | |
| | CDRL3 | of STIM002-B using | |
| | | IMGT | |
| 401 | STIM00 | Amino acid | DIVMTQSPLSLPVTPGEPASISCRSSQSLLHS |
| | 2-B- | sequence of V_{L} of | DGYNCLDWYLQKPGQSPQLLIYLGSTRASG |
| | Light | STIM002-B | FPDRFSGSGSGTDFTLKISRVEAEDVGVYYC |
| | chain | | MQALQTPCSFGQGTKLEIK |
| | variable | | |
| | region | | |
| 402 | STIM00 | Nucleic acid | GATATTGTGATGACTCAGTCTCCACTCTCC |
| | 2-B- | sequence of V_{L} of | CTGCCCGTCACCCCTGGAGAGCCGGCCTC |
| | Light | STIM002-B | CATCTCCTGCAGGTCTAGTCAGAGCCTCCT |
| | chain | | GCATAGTGATGGATACAACTGTTTGGATT |
| | variable | | GGTACCTGCAGAAGCCAGGGCAGTCTCCA |
| | region | | CAGCTCCTGATCTATTTGGGTTCTACTCGG |
| | | | GCCTCCGGGTTCCCTGACAGGTTCAGTGG |
| | | | CAGTGGATCAGGCACAGATTTTACACTGA |
| | | | AAATCAGCAGAGTGGAGGCTGAGGATGTT |
| | | | GGGGTTTATTACTGCATGCAAGCTCTACA |
| | | | AACTCCGTGCAGTTTTGGCCAGGGGACCA |
| | | | AGCTGGAGATCAAA |
| 403 | STIM00 | Amino acid | DIVMTQSPLSLPVTPGEPASISCRSSQSLLHS |
| | 2-B- | sequence of | DGYNCLDWYLQKPGQSPQLLIYLGSTRASG |
| | full light | STIM002-B light | FPDRFSGSGSGTDFTLKISRVEAEDVGVYYC |
| | chain | chain | MQALQTPCSFGQGTKLEIK |
| | sequence | | RTVAAPSVFIFPPSDEQLKSGTASVVCLLNN |
| | | | FYPREAKVQWKVDNALQSGNSQESVTEQD |
| | | | SKDSTYSLSSTLTLSKADYEKHKVYACEVT |
| | | | HQGLSSPVTKSFNRGEC |
| 404 | STIM00 | Nucleic acid | GATATTGTGATGACTCAGTCTCCACTCTCC |
| | 2-B- | sequence of | CTGCCCGTCACCCCTGGAGAGCCGGCCTC |
| | full light | STIM002-B light | CATCTCCTGCAGGTCTAGTCAGAGCCTCCT |
| | chain | chain | GCATAGTGATGGATACAACTGTTTGGATT |
| | sequence | | GGTACCTGCAGAAGCCAGGGCAGTCTCCA |
| | | | CAGCTCCTGATCTATTTGGGTTCTACTCGG |
| | | | GCCTCCGGGTTCCCTGACAGGTTCAGTGG |
| | | | CAGTGGATCAGGCACAGATTTTACACTGA |
| | | | AAATCAGCAGAGTGGAGGCTGAGGATGTT |
| | | | GGGGTTTATTACTGCATGCAAGCTCTACA |
| | | | AACTCCGTGCAGTTTTGGCCAGGGGACCA |
| | | | AGCTGGAGATCAAAcgtacggtggccgctc |
| | | | cctccgtgttcatcttcccaccttccgacg |
| | | | agcagctgaagtccggcaccgcttctgtcg |
| | | | tgtgcctgctgaacaacttctacccccgcg |
| | | | aggccaaggtgcagtggaaggtggacaacg |
| | | | ccctgcagtccggcaactcccaggaatccg |
| | | | tgaccgagcaggactccaaggacagcacct |
| | | | actccctgtcctccaccctgaccctgtcca |
| | | | aggccgactacgagaagcacaaggtgtacg |
| | | | cctgcgaagtgacccaccagggcctgtcta |
| | | | gccccgtgaccaagtctttcaaccggggcg |
| | | | agtgt |
| 405 | STIM00 | Amino acid | GVTFDDYG |
| | 3 | sequence of CDRH1 | |
| | (KY1 | of STIM003 using | |
| | 044)- | IMGT | |
| | CDRH1 | | |
| 406 | STIM00 | Amino acid | INWNGGDT |
| | 3 | sequence of CDRH2 | |
| | (KY1 | of STIM003 using | |
| | 044)- | IMGT | |
| | CDRH2 | | |
| 407 | STIM00 | Amino acid | ARDFYGSGSYYHVPFDY |
| | 3 | sequence of CDRH3 | |
| | (KY1 | of STIM003 using | |
| | 044)- | IMGT | |
| | CDRH3 | | |
| 408 | STIM00 | Amino acid | EVQLVESGGGVVRPGGSLRLSCVASGVTFD |
| | 3 | sequence of V_{H} of | DYGMSWVRQAPGKGLEWVSGINWNGGDT |
| | (KY1 | STIM003 | DYSDSVKGRFTISRDNAKNSLYLQMNSLRA |
| | 044)- | | EDTALYYCARDFYGSGSYYHVPFDYWGQGI |
| | Heavy | | LVTVSS |
| | chain | | |
| | variable | | |
| | region | | |
| 409 | STIM00 | Nucleic acid | GAGGTGCAGCTGGTGGAGTCTGGGGGAGG |
| | 3- | sequence of V_{H} of | TGTGGTACGGCCTGGGGGGTCCCTGAGAC |
| | Heavy | STIM003 | TCTCCTGTGTAGCCTCTGGAGTCACCTTTG |
| | chain | | ATGATTATGGCATGAGCTGGGTCCGCCAA |
| | variable | | GCTCCAGGGAAGGGGCTGGARTGGGTCTC |
| | region | | TGGTATTAATTGGAATGGTGGCGACACAG |
| | | | ATTATTCAGACTCTGTGAAGGGCCGATTC |
| | | | ACCATCTCCAGAGACAACGCCAAGAACTC |
| | | | CCTGTATCTACAAATGAATAGTCTGAGAG |
| | | | CCGAGGACACGGCCTTGTATTACTGTGCG |
| | | | AGGGATTTCTATGGTTCGGGGAGTTATTAT |
| | | | CACGTTCCTTTTGACTACTGGGGCCAGGG |
| | | | AATCCTGGTCACCGTCTCCTCA |
| 410 | STIM00 | Amino acid | EVQLVESGGGVVRPGGSLRLSCVASGVTFD |
| | 3 | sequence of | DYGMSWVRQAPGKGLEWVSGINWNGGDT |
| | (KY1044)- | STIM003 heavy | DYSDSVKGRFTISRDNAKNSLYLQMNSLRA |
| | full | chain | EDTALYYCARDFYGSGSYYHVPFDYWGQGI |
| | heavy | | LVTVSSASTKGPSVFPLAPSSKSTSGGTAAL |
| | chain | | GCLVKDYFPEPVTVSWNSGALTSGVHTFPA |
| | sequence | | VLQSSGLYSLSSVVTVPSSSLGTQTYICNVN |
| | | | HKPSNTKVDKKVEPKSCDKTHTCPPCPAPEL |
| | | | LGGPSVFLFPPKPKDTLMISRTPEVTCVVVD |
| | | | VSHEDPEVKFNWYVDGVEVHNAKTKPREE |
| | | | QYNSTYRVVSVLTVLHQDWLNGKEYKCKV |
| | | | SNKALPAPIEKTISKAKGQPREPQVYTLPPSR |
| | | | DELTKNQVSLTCLVKGFYPSDIAVEWESNG |
| | | | QPENNYKTTPPVLDSDGSFFLYSKLTVDKSR |
| | | | WQQGNVFSCSVMHEALHNHYTQKSLSLSP |
| | | | GK |
| 411 | STIM00 | Nucleic acid | GAGGTGCAGCTGGTGGAGTCTGGGGGAGG |
| | 3-full | sequence of | TGTGGTACGGCCTGGGGGGTCCCTGAGAC |
| | heavy | STIM003 heavy | TCTCCTGTGTAGCCTCTGGAGTCACCTTTG |
| | chain | chain | ATGATTATGGCATGAGCTGGGTCCGCCAA |
| | sequence | | GCTCCAGGGAAGGGGCTGGARTGGGTCTC |
| | | | TGGTATTAATTGGAATGGTGGCGACACAG |
| | | | ATTATTCAGACTCTGTGAAGGGCCGATTC |
| | | | ACCATCTCCAGAGACAACGCCAAGAACTC |
| | | | CCTGTATCTACAAATGAATAGTCTGAGAG |
| | | | CCGAGGACACGGCCTTGTATTACTGTGCG |
| | | | AGGGATTTCTATGGTTCGGGGAGTTATTAT |
| | | | CACGTTCCTTTTGACTACTGGGGCCAGGG |
| | | | AATCCTGGTCACCGTCTCCTCAGCCAGCA |
| | | | CCAAGGGCCCCTCTGTGTTCCCTCTGGCCC |
| | | | CTTCCAGCAAGTCCACCTCTGGCGGAACA |
| | | | GCCGCTCTGGGCTGCCTCGTGAAGGACTA |
| | | | CTTCCCCGAGCCTGTGACCGTGTCCTGGA |
| | | | ACTCTGGCGCTCTGACCAGCGGAGTGCAC |
| | | | ACCTTCCCTGCTGTGCTGCAGTCCTCCGGC |
| | | | CTGTACTCCCTGTCCTCCGTCGTGACCGTG |
| | | | CCTTCCAGCTCTCTGGGCACCCAGACCTAC |
| | | | ATCTGCAACGTGAACCACAAGCCCTCCAA |
| | | | CACCAAGGTGGACAAGAAGGTGGAACCC |
| | | | AAGTCCTGCGACAAGACCCACACCTGTCC |
| | | | CCCTTGTCCTGCCCCTGAACTGCTGGGCGG |
| | | | ACCTTCCGTGTTCCTGTTCCCCCCAAAGCC |
| | | | CAAGGACACCCTGATGATCTCCCGGACCC |
| | | | CCGAAGTGACCTGCGTGGTGGTGGATGTG |
| | | | TCCCACGAGGACCCTGAAGTGAAGTTCAA |
| | | | TTGGTACGTGGACGGCGTGGAAGTGCACA |
| | | | ACGCCAAGACCAAGCCTAGAGAGGAACA |
| | | | GTACAACTCCACCTACCGGGTGGTGTCCG |
| | | | TGCTGACCGTGCTGCACCAGGATTGGCTG |
| | | | AACGGCAAAGAGTACAAGTGCAAGGTGTC |
| | | | CAACAAGGCCCTGCCTGCCCCCATCGAAA |
| | | | AGACCATCTCCAAGGCCAAGGGCCAGCCC |
| | | | CGGGAACCCCAGGTGTACACACTGCCCCC |
| | | | TAGCAGGGACGAGCTGACCAAGAACCAG |
| | | | GTGTCCCTGACCTGTCTCGTGAAAGGCTTC |
| | | | TACCCCTCCGATATCGCCGTGGAATGGGA |
| | | | GTCCAACGGCCAGCCTGAGAACAACTACA |
| | | | AGACCACCCCCCCTGTGCTGGACTCCGAC |
| | | | GGCTCATTCTTCCTGTACAGCAAGCTGAC |
| | | | AGTGGACAAGTCCCGGTGGCAGCAGGGCA |
| | | | ACGTGTTCTCCTGCTCCGTGATGCACGAG |
| | | | GCCCTGCACAACCACTACACCCAGAAGTC |
| | | | CCTGTCCCTGAGCCCCGGCAAGTGATGA |
| 412 | STIM00 | Amino acid | QSVSRSY |
| | 3 | sequence of CDRL1 | |
| | (KY1044 | of STIM003 using | |
| | )- | IMGT | |
| | CDRL1 | | |
| 413 | STIM00 | Amino acid | GAS |
| | 3 | sequence of CDRL2 | |
| | (KY1044 | of STIM003 using | |
| | )- | IMGT | |
| | CDRL2 | | |
| 414 | STIM00 | Amino acid | HQYDMSPFT |
| | 3 | sequence of CDRL3 | |
| | (KY1044 | of STIM003 using | |
| | )- | IMGT | |
| | CDRL3 | | |
| 415 | STIM00 | Amino acid | EIVLTQSPGTLSLSPGERATLSCRASQSVSRS |
| | 3 | sequence of V_{L} of | YLAWYQQKRGQAPRLLIYGASSRATGIPDR |
| | (KY1044 | STIM003 | FSGDGSGTDFTLSISRLEPEDFAVYYCHQYD |
| | )-Light | | MSPFTFGPGTKVDIK |
| | chain | | |
| | variable | | |
| | region | | |
| 416 | STIM00 | Nucleic acid | GAAATTGTGTTGACGCAGTCTCCAGGGAC |
| | 3-Light | sequence of V_{L} of | CCTGTCTTTGTCTCCAGGGGAAAGAGCCA |
| | chain | STIM003 | CCCTCTCCTGCAGGGCCAGTCAGAGTGTT |
| | variable | | AGCAGAAGCTACTTAGCCTGGTACCAGCA |
| | region | | GAAACGTGGCCAGGCTCCCAGGCTCCTCA |
| | | | TCTATGGTGCATCCAGCAGGGCCACTGGC |
| | | | ATCCCAGACAGGTTCAGTGGCGATGGGTC |
| | | | TGGGACAGACTTCACTCTCTCCATCAGCA |
| | | | GACTGGAGCCTGAAGATTTTGCAGTGTAT |
| | | | TACTGTCACCAGTATGATATGTCACCATTC |
| | | | ACTTTCGGCCCTGGGACCAAAGTGGATAT |
| | | | CAAA |
| 417 | STIM00 | Amino acid | EIVLTQSPGTLSLSPGERATLSCRASQSVSRS |
| | 3 | sequence of | YLAWYQQKRGQAPRLLIYGASSRATGIPDR |
| | (KY1044)- | STIM003 light chain | FSGDGSGTDFTLSISRLEPEDFAVYYCHQYD |
| | full | | MSPFTFGPGTKVDIKRTVAAPSVFIFPPSDEQ |
| | light | | LKSGTASVVCLLNNFYPREAKVQWKVDNA |
| | chain | | LQSGNSQESVTEQDSKDSTYSLSSTLTLSKA |
| | sequence | | DYEKHKVYACEVTHQGLSSPVTKSFNRGEC |
| 418 | STIM00 | Nucleic acid | GAAATTGTGTTGACGCAGTCTCCAGGGAC |
| | 3-full | sequence of | CCTGTCTTTGTCTCCAGGGGAAAGAGCCA |
| | light | STIM003 light chain | CCCTCTCCTGCAGGGCCAGTCAGAGTGTT |
| | chain | | AGCAGAAGCTACTTAGCCTGGTACCAGCA |
| | sequence | | GAAACGTGGCCAGGCTCCCAGGCTCCTCA |
| | | | TCTATGGTGCATCCAGCAGGGCCACTGGC |
| | | | ATCCCAGACAGGTTCAGTGGCGATGGGTC |
| | | | TGGGACAGACTTCACTCTCTCCATCAGCA |
| | | | GACTGGAGCCTGAAGATTTTGCAGTGTAT |
| | | | TACTGTCACCAGTATGATATGTCACCATTC |
| | | | ACTTTCGGCCCTGGGACCAAAGTGGATAT |
| | | | CAAAcgtacggtggccgctccctccgtgt |
| | | | tcatcttcccaccttccgacgagcagctg |
| | | | aagtccggcaccgcttctgtcgtgtgcct |
| | | | gctgaacaacttctacccccgcgaggcca |
| | | | caggtgcagtggaaggtggacaacgccct |
| | | | ggcagtccggcaactcccaggaatccgtg |
| | | | accgagcaggactcaaggacagcacctac |
| | | | tccctgtcctccaccctgaccctgtccaa |
| | | | gccgactacgagaagcacaaggtgtacgc |
| | | | ctgcgaagtgacccaccagggcctgtcta |
| | | | gccccgtgaccaagtctttcaaccggggc |
| | | | gagtgt |
| 419 | STIM00 | Amino acid | GLTFDDYG |
| | 4- | sequence of CDRH1 | |
| | CDRH1 | of STIM004 using | |
| | | IMGT | |
| 420 | STIM00 | Amino acid | INWNGDNT |
| | 4- | sequence of CDRH2 | |
| | CDRH2 | of STIM004 using | |
| | | IMGT | |
| 421 | STIM00 | Amino acid | ARDYYGSGSYYNVPFDY |
| | 4- | sequence of CDRH3 | |
| | CDRH3 | of STIM004 using | |
| | | IMGT | |
| 422 | STIM00 | Amino acid | EVQLVESGGGVVRPGGSLRLSCAASGLTFD |
| | 4- | sequence of V_{H} of | DYGMSWVRQVPGKGLEWVSGINWNGDNT |
| | Heavy | STIM004 | DYADSVKGRFTISRDNAKNSLYLQMNSLRA |
| | chain | | EDTALYYCARDYYGSGSYYNVPFDYWGQG |
| | variable | | TLVTVSS |
| | region | | |
| 423 | STIM00 | Nucleic acid | GAGGTGCAGCTGGTGGAGTCTGGGGGAGG |
| | 4- | sequence of V_{H} of | TGTGGTACGGCCTGGGGGGTCCCTGAGAC |
| | Heavy | STIM004 | TCTCCTGTGCAGCCTCTGGACTCACCTTTG |
| | chain | | ATGATTATGGCATGAGCTGGGTCCGCCAA |
| | variable | | GTTCCAGGGAAGGGGCTGGAGTGGGTCTC |
| | region | | TGGTATTAATTGGAATGGTGATAACACAG |
| | | | ATTATGCAGACTCTGTGAAGGGCCGATTC |
| | | | ACCATCTCCAGAGACAACGCCAAGAACTC |
| | | | CCTGTATCTGCAAATGAACAGTCTGAGAG |
| | | | CCGAGGACACGGCCTTGTATTACTGTGCG |
| | | | AGGGATTACTATGGTTCGGGGAGTTATTA |
| | | | TAACGTTCCTTTTGACTACTGGGGCCAGG |
| | | | GAACCCTGGTCACCGTCTCCTCA |
| 424 | STIM00 | Amino acid | EVQLVESGGGVVRPGGSLRLSCAASGLTFD |
| | 4-full | sequence of | DYGMSWVRQVPGKGLEWVSGINWNGDNT |
| | heavy | STIM004 heavy | DYADSVKGRFTISRDNAKNSLYLQMNSLRA |
| | chain | chain | EDTALYYCARDYYGSGSYYNVPFDYWGQG |
| | sequence | | TLVTVSSASTKGPSVFPLAPSSKSTSGGTAAL |
| | | | GCLVKDYFPEPVTVSWNSGALTSGVHTFPA |
| | | | VLQSSGLYSLSSVVTVPSSSLGTQTYICNVN |
| | | | HKPSNTKVDKKVEPKSCDKTHTCPPCPAPEL |
| | | | LGGPSVFLFPPKPKDTLMISRTPEVTCVVVD |
| | | | VSHEDPEVKFNWYVDGVEVHNAKTKPREE |
| | | | QYNSTYRVVSVLTVLHQDWLNGKEYKCKV |
| | | | SNKALPAPIEKTISKAKGQPREPQVYTLPPSR |
| | | | DELTKNQVSLTCLVKGFYPSDIAVEWESNG |
| | | | QPENNYKTTPPVLDSDGSFFLYSKLTVDKSR |
| | | | WQQGNVFSCSVMHEALHNHYTQKSLSLSP |
| | | | GK |
| 425 | STIM00 | Nucleic acid | GAGGTGCAGCTGGTGGAGTCTGGGGGAGG |
| | 4-full | sequence of | TGTGGTACGGCCTGGGGGGTCCCTGAGAC |
| | heavy | STIM004 heavy | TCTCCTGTGCAGCCTCTGGACTCACCTTTG |
| | chain | chain | ATGATTATGGCATGAGCTGGGTCCGCCAA |
| | sequence | | GTTCCAGGGAAGGGGCTGGAGTGGGTCTC |
| | | | TGGTATTAATTGGAATGGTGATAACACAG |
| | | | ATTATGCAGACTCTGTGAAGGGCCGATTC |
| | | | ACCATCTCCAGAGACAACGCCAAGAACTC |
| | | | CCTGTATCTGCAAATGAACAGTCTGAGAG |
| | | | CCGAGGACACGGCCTTGTATTACTGTGCG |
| | | | AGGGATTACTATGGTTCGGGGAGTTATTA |
| | | | TAACGTTCCTTTTGACTACTGGGGCCAGG |
| | | | GAACCCTGGTCACCGTCTCCTCAGCCAGC |
| | | | ACCAAGGGCCCCTCTGTGTTCCCTCTGGCC |
| | | | CCTTCCAGCAAGTCCACCTCTGGCGGAAC |
| | | | AGCCGCTCTGGGCTGCCTCGTGAAGGACT |
| | | | ACTTCCCCGAGCCTGTGACCGTGTCCTGG |
| | | | AACTCTGGCGCTCTGACCAGCGGAGTGCA |
| | | | CACCTTCCCTGCTGTGCTGCAGTCCTCCGG |
| | | | CCTGTACTCCCTGTCCTCCGTCGTGACCGT |
| | | | GCCTTCCAGCTCTCTGGGCACCCAGACCT |
| | | | ACATCTGCAACGTGAACCACAAGCCCTCC |
| | | | AACACCAAGGTGGACAAGAAGGTGGAAC |
| | | | CCAAGTCCTGCGACAAGACCCACACCTGT |
| | | | CCCCCTTGTCCTGCCCCTGAACTGCTGGGC |
| | | | GGACCTTCCGTGTTCCTGTTCCCCCCAAAG |
| | | | CCCAAGGACACCCTGATGATCTCCCGGAC |
| | | | CCCCGAAGTGACCTGCGTGGTGGTGGATG |
| | | | TGTCCCACGAGGACCCTGAAGTGAAGTTC |
| | | | AATTGGTACGTGGACGGCGTGGAAGTGCA |
| | | | CAACGCCAAGACCAAGCCTAGAGAGGAA |
| | | | CAGTACAACTCCACCTACCGGGTGGTGTC |
| | | | CGTGCTGACCGTGCTGCACCAGGATTGGC |
| | | | TGAACGGCAAAGAGTACAAGTGCAAGGT |
| | | | GTCCAACAAGGCCCTGCCTGCCCCCATCG |
| | | | AAAAGACCATCTCCAAGGCCAAGGGCCAG |
| | | | CCCCGGGAACCCCAGGTGTACACACTGCC |
| | | | CCCTAGCAGGGACGAGCTGACCAAGAACC |
| | | | AGGTGTCCCTGACCTGTCTCGTGAAAGGC |
| | | | TTCTACCCCTCCGATATCGCCGTGGAATGG |
| | | | GAGTCCAACGGCCAGCCTGAGAACAACTA |
| | | | CAAGACCACCCCCCCTGTGCTGGACTCCG |
| | | | ACGGCTCATTCTTCCTGTACAGCAAGCTG |
| | | | ACAGTGGACAAGTCCCGGTGGCAGCAGGG |
| | | | CAACGTGTTCTCCTGCTCCGTGATGCACGA |
| | | | GGCCCTGCACAACCACTACACCCAGAAGT |
| | | | CCCTGTCCCTGAGCCCCGGCAAGTGATGA |
| 426 | STIM00 | Amino acid | QSVSSSY |
| | 4- | sequence of CDRL1 | |
| | CDRL1 | of STIM004 using | |
| | | IMGT | |
| 427 | STIM00 | Amino acid | GAS |
| | 4- | sequence of CDRL2 | |
| | CDRL2 | of STIM004 using | |
| | | IMGT | |
| 428 | STIM00 | Amino acid | QQYGSSPF |
| | 4- | sequence of CDRL3 | |
| | CDRL3 | of STIM004 using | |
| | | IMGT | |
| 429 | STIM00 | Amino acid | EIVLTQSPGTLSLSPGERATLSCRASQSVSSS |
| | 4- | sequence of | YLAWYQQKPGQAPRLLIYGASSRATGIPDRF |
| | Corrected | corrected V_{L} of | SGSGSGTDFTLTIRRLEPEDFAVYYCQQYGS |
| | light | STIM004 | SPFFGPGTKVDIK |
| | chain | | |
| | variable | | |
| | region | | |
| 430 | STIM00 | Nucleic acid | GAAATTGTGTTGACGCAGTCTCCAGGCAC |
| | 4- | sequence of | CCTGTCTTTGTCTCCAGGGGAAAGAGCCA |
| | Correcte | corrected V_{L} of | CCCTCTCCTGCAGGGCCAGTCAGAGTGTT |
| | d light | STIM004 | AGCAGCAGCTACTTAGCCTGGTACCAGCA |
| | chain | | GAAACCTGGCCAGGCTCCCAGGCTCCTCA |
| | variable | | TATATGGTGCATCCAGCAGGGCCACTGGC |
| | region | | ATCCCAGACAGGTTCAGTGGCAGTGGGTC |
| | | | TGGGACAGACTTCACTCTCACCATCAGAA |
| | | | GACTGGAGCCTGAAGATTTTGCAGTGTAT |
| | | | TACTGTCAGCAGTATGGTAGTTCACCATTC |
| | | | TTCGGCCCTGGGACCAAAGTGGATATCAA |
| | | | A |
| 431 | STIM00 | Nucleic acid | GAAATTGTGTTGACGCAGTCTCCAGGCAC |
| | 4-Light | sequence of V_{L} of | CCTGTCTTTGTCTCCAGGGGAAAGAGCCA |
| | chain | STIM004 | CCCTCTCCTGCAGGGCCAGTCAGAGTGTT |
| | variable | | AGCAGCAGCTACTTAGCCTGGTACCAGCA |
| | region | | GAAACCTGGCCAGGCTCCCAGGCTCCTCA |
| | | | TATATGGTGCATCCAGCAGGGCCACTGGC |
| | | | ATCCCAGACAGGTTCAGTGGCAGTGGGTC |
| | | | TGGGACAGACTTCACTCTCACCATCAGAA |
| | | | GACTGGAGCCTGAAGATTTTGCAGTGTAT |
| | | | TACTGTCAGCAGTATGGTAGTTCACCATTC |
| | | | ACTTCGGCCCTGGGACCAAAGTGGATATC |
| | | | AAA |
| 432 | STIM00 | Amino acid | EIVLTQSPGTLSLSPGERATLSCRASQSVSSS |
| | 4-full | sequence of | YLAWYQQKPGQAPRLLIYGASSRATGIPDRF |
| | corrected | STIM004 light chain | SGSGSGTDFTLTIRRLEPEDFAVYYCQQYGS |
| | light | | SPFFGPGTKVDIKRTVAAPSVFIFPPSDEQLK |
| | chain | | SGTASVVCLLNNFYPREAKVQWKVDNALQ |
| | sequence | | SGNSQESVTEQDSKDSTYSLSSTLTLSKADY |
| | | | EKHKVYACEVTHQGLSSPVTKSFNRGEC |
| 433 | STIM00 | Nucleic acid | GAAATTGTGTTGACGCAGTCTCCAGGCAC |
| | 4-full | sequence of | CCTGTCTTTGTCTCCAGGGGAAAGAGCCA |
| | corrected | corrected STIM004 | CCCTCTCCTGCAGGGCCAGTCAGAGTGTT |
| | light | light chain | AGCAGCAGCTACTTAGCCTGGTACCAGCA |
| | chain | | GAAACCTGGCCAGGCTCCCAGGCTCCTCA |
| | sequence | | TATATGGTGCATCCAGCAGGGCCACTGGC |
| | | | ATCCCAGACAGGTTCAGTGGCAGTGGGTC |
| | | | TGGGACAGACTTCACTCTCACCATCAGAA |
| | | | GACTGGAGCCTGAAGATTTTGCAGTGTAT |
| | | | TACTGTCAGCAGTATGGTAGTTCACCATTC |
| | | | TTCGGCCCTGGGACCAAAGTGGATATCAA |
| | | | Acgtacggtggccgctccctccgtgttcatc |
| | | | ttcccaccttccgacgagcagctgaagtcc |
| | | | ggcaccgcttctgtcgtgtgcctgctgaaca |
| | | | acttctacccccgcgaggccaaggtgcagtg |
| | | | gaaggtggacaacgccctgcagtccggcaac |
| | | | tcccaggaatccgtgaccgagcaggactcca |
| | | | aggacagcacctactccctgtcctccaccct |
| | | | gaccctgtccaaggccgactacgagaagcac |
| | | | aaggtgtacgcctgcgaagtgacccaccagg |
| | | | gcctgtctagccccgtgaccaagtctttcaa |
| | | | ccggggcgagtgt |
| 434 | STIM00 | Nucleic acid | GAAATTGTGTTGACGCAGTCTCCAGGCAC |
| | 4-full | sequence of | CCTGTCTTTGTCTCCAGGGGAAAGAGCCA |
| | light | STIM004 light chain | CCCTCTCCTGCAGGGCCAGTCAGAGTGTT |
| | chain | | AGCAGCAGCTACTTAGCCTGGTACCAGCA |
| | sequence | | GAAACCTGGCCAGGCTCCCAGGCTCCTCA |
| | | | TATATGGTGCATCCAGCAGGGCCACTGGC |
| | | | ATCCCAGACAGGTTCAGTGGCAGTGGGTC |
| | | | TGGGACAGACTTCACTCTCACCATCAGAA |
| | | | GACTGGAGCCTGAAGATTTTGCAGTGTAT |
| | | | TACTGTCAGCAGTATGGTAGTTCACCATTC |
| | | | ACTTCGGCCCTGGGACCAAAGTGGATATC |
| | | | AAAcgtacggtggccgctccctccgtgttca |
| | | | tcttcccaccttccgacgagcagctgaagtc |
| | | | cggcaccgcttctgtcgtgtgcctgctgaac |
| | | | aacttctacccccgcgaggccaaggtgcagt |
| | | | ggaaggtggacaacgccctgcagtccggcaa |
| | | | ctcccaggaatccgtgaccgagcaggactcc |
| | | | aaggacagcacctactccctgtcctccaccc |
| | | | tgaccctgtccaaggccgactacgagaagca |
| | | | caaggtgtacgcctgcgaagtgacccaccag |
| | | | ggcctgtctagccccgtgaccaagtctttca |
| | | | accggggcgagtgt |
| 435 | STIM00 | Amino acid | GYTFNSYG |
| | 5- | sequence of CDRH1 | |
| | CDRH1 | of STIM005 using | |
| | | IMGT | |
| 436 | STIM00 | Amino acid | ISVHNGNT |
| | 5- | sequence of CDRH2 | |
| | CDRH2 | of STIM005 using | |
| | | IMGT | |
| 437 | STIM00 | Amino acid | ARAGYDILTDFSDAFDI |
| | 5- | sequence of CDRH3 | |
| | CDRH3 | of STIM005 using | |
| | | IMGT | |
| 438 | STIM00 | Amino acid | QVQLVQSGAEVKKPGASVKVSCKASGYTF |
| | 5- | sequence of V_{H} of | NSYGIIWVRQAPGQGLEWMGWISVHNGNT |
| | Heavy | STIM005 | NCAQKLQGRVTMTTDTSTSTAYMELRSLRT |
| | chain | | DDTAVYYCARAGYDILTDFSDAFDIWGHGT |
| | variable | | MVTVSS |
| | region | | |
| 439 | STIM00 | Nucleic acid | CAGGTTCAGTTGGTGCAGTCTGGAGCTGA |
| | 5- | sequence of V_{H} of | GGTGAAGAAGCCTGGGGCCTCAGTGAAGG |
| | Heavy | STIM005 | TCTCCTGCAAGGCTTCTGGTTACACCTTTA |
| | chain | | ATAGTTATGGTATCATCTGGGTGCGACAG |
| | variable | | GCCCCTGGACAAGGGCTTGAGTGGATGGG |
| | region | | ATGGATCAGCGTTCACAATGGTAACACAA |
| | | | ACTGTGCACAGAAGCTCCAGGGTAGAGTC |
| | | | ACCATGACCACAGACACATCCACGAGCAC |
| | | | AGCCTACATGGAGCTGAGGAGCCTGAGAA |
| | | | CTGACGACACGGCCGTGTATTACTGTGCG |
| | | | AGAGCGGGTTACGATATTTTGACTGATTTT |
| | | | TCCGATGCTTTTGATATCTGGGGCCACGG |
| | | | GACAATGGTCACCGTCTCTTCA |
| 440 | STIM00 | Amino acid | QVQLVQSGAEVKKPGASVKVSCKASGYTF |
| | 5-full | sequence of | NSYGIIWVRQAPGQGLEWMGWISVHNGNT |
| | heavy | STIM005 heavy | NCAQKLQGRVTMTTDTSTSTAYMELRSLRT |
| | chain | chain | DDTAVYYCARAGYDILTDFSDAFDIWGHGT |
| | sequence | | MVTVSSASTKGPSVFPLAPSSKSTSGGTAAL |
| | | | GCLVKDYFPEPVTVSWNSGALTSGVHTFPA |
| | | | VLQSSGLYSLSSVVTVPSSSLGTQTYICNVN |
| | | | HKPSNTKVDKKVEPKSCDKTHTCPPCPAPEL |
| | | | LGGPSVFLFPPKPKDTLMISRTPEVTCVVVD |
| | | | VSHEDPEVKFNWYVDGVEVHNAKTKPREE |
| | | | QYNSTYRVVSVLTVLHQDWLNGKEYKCKV |
| | | | SNKALPAPIEKTISKAKGQPREPQVYTLPPSR |
| | | | DELTKNQVSLTCLVKGFYPSDIAVEWESNG |
| | | | QPENNYKTTPPVLDSDGSFFLYSKLTVDKSR |
| | | | WQQGNVFSCSVMHEALHNHYTQKSLSLSP |
| | | | GK |
| 441 | STIM00 | Nucleic acid | CAGGTTCAGTTGGTGCAGTCTGGAGCTGA |
| | 5-full | sequence of | GGTGAAGAAGCCTGGGGCCTCAGTGAAGG |
| | heavy | STIM005 heavy | TCTCCTGCAAGGCTTCTGGTTACACCTTTA |
| | chain | chain | ATAGTTATGGTATCATCTGGGTGCGACAG |
| | sequence | | GCCCCTGGACAAGGGCTTGAGTGGATGGG |
| | | | ATGGATCAGCGTTCACAATGGTAACACAA |
| | | | ACTGTGCACAGAAGCTCCAGGGTAGAGTC |
| | | | ACCATGACCACAGACACATCCACGAGCAC |
| | | | AGCCTACATGGAGCTGAGGAGCCTGAGAA |
| | | | CTGACGACACGGCCGTGTATTACTGTGCG |
| | | | AGAGCGGGTTACGATATTTTGACTGATTTT |
| | | | TCCGATGCTTTTGATATCTGGGGCCACGG |
| | | | GACAATGGTCACCGTCTCTTCA |
| | | | GCCAGCACCAAGGGCCCCTCTGTGTTCCC |
| | | | TCTGGCCCCTTCCAGCAAGTCCACCTCTGG |
| | | | CGGAACAGCCGCTCTGGGCTGCCTCGTGA |
| | | | AGGACTACTTCCCCGAGCCTGTGACCGTG |
| | | | TCCTGGAACTCTGGCGCTCTGACCAGCGG |
| | | | AGTGCACACCTTCCCTGCTGTGCTGCAGTC |
| | | | CTCCGGCCTGTACTCCCTGTCCTCCGTCGT |
| | | | GACCGTGCCTTCCAGCTCTCTGGGCACCC |
| | | | AGACCTACATCTGCAACGTGAACCACAAG |
| | | | CCCTCCAACACCAAGGTGGACAAGAAGGT |
| | | | GGAACCCAAGTCCTGCGACAAGACCCACA |
| | | | CCTGTCCCCCTTGTCCTGCCCCTGAACTGC |
| | | | TGGGCGGACCTTCCGTGTTCCTGTTCCCCC |
| | | | CAAAGCCCAAGGACACCCTGATGATCTCC |
| | | | CGGACCCCCGAAGTGACCTGCGTGGTGGT |
| | | | GGATGTGTCCCACGAGGACCCTGAAGTGA |
| | | | AGTTCAATTGGTACGTGGACGGCGTGGAA |
| | | | GTGCACAACGCCAAGACCAAGCCTAGAGA |
| | | | GGAACAGTACAACTCCACCTACCGGGTGG |
| | | | TGTCCGTGCTGACCGTGCTGCACCAGGAT |
| | | | TGGCTGAACGGCAAAGAGTACAAGTGCAA |
| | | | GGTGTCCAACAAGGCCCTGCCTGCCCCCA |
| | | | TCGAAAAGACCATCTCCAAGGCCAAGGGC |
| | | | CAGCCCCGGGAACCCCAGGTGTACACACT |
| | | | GCCCCCTAGCAGGGACGAGCTGACCAAGA |
| | | | ACCAGGTGTCCCTGACCTGTCTCGTGAAA |
| | | | GGCTTCTACCCCTCCGATATCGCCGTGGA |
| | | | ATGGGAGTCCAACGGCCAGCCTGAGAACA |
| | | | ACTACAAGACCACCCCCCCTGTGCTGGAC |
| | | | TCCGACGGCTCATTCTTCCTGTACAGCAAG |
| | | | CTGACAGTGGACAAGTCCCGGTGGCAGCA |
| | | | GGGCAACGTGTTCTCCTGCTCCGTGATGC |
| | | | ACGAGGCCCTGCACAACCACTACACCCAG |
| | | | AAGTCCCTGTCCCTGAGCCCCGGCAAGTG |
| | | | ATGA |
| 442 | STIM00 | Amino acid | QNINNF |
| | 5- | sequence of CDRL1 | |
| | CDRL1 | of STIM005 using | |
| | | IMGT | |
| 443 | STIM00 | Amino acid | AAS |
| | 5- | sequence of CDRL2 | |
| | CDRL2 | of STIM005 using | |
| | | IMGT | |
| 444 | STIM00 | Amino acid | QQSYGIPW |
| | 5- | sequence of CDRL3 | |
| | CDRL3 | of STIM005 using | |
| | | IMGT | |
| 445 | STIM00 | Amino acid | DIQMTQSPSSLSASVGDRVTITCRASQNINNF |
| | 5-Light | sequence of V_{L} of | LNWYQQKEGKGPKLLIYAASSLQRGIPSTFS |
| | chain | STIM005 | GSGSGTDFTLTISSLQPEDFATYICQQSYGIP |
| | variable | | WVGQGTKVEIK |
| | region | | |
| 446 | STIM00 | Nucleic acid | GACATCCAGATGACCCAGTCTCCATCCTC |
| | 5-Light | sequence of V_{L} of | CCTGTCTGCATCTGTAGGAGACAGAGTCA |
| | chain | STIM005 | CCATCACTTGCCGGGCAAGTCAGAACATT |
| | variable | | AATAACTTTTTAAATTGGTATCAGCAGAA |
| | region | | AGAAGGGAAAGGCCCTAAGCTCCTGATCT |
| | | | ATGCAGCATCCAGTTTGCAAAGAGGGATA |
| | | | CCATCAACGTTCAGTGGCAGTGGATCTGG |
| | | | GACAGACTTCACTCTCACCATCAGCAGTC |
| | | | TGCAACCTGAAGATTTTGCAACTTACATCT |
| | | | GTCAACAGAGCTACGGTATCCCGTGGGTC |
| | | | GGCCAAGGGACCAAGGTGGAAATCAAA |
| 447 | STIM00 | Amino acid | DIQMTQSPSSLSASVGDRVTITCRASQNINNF |
| | 5-full | sequence of | LNWYQQKEGKGPKLLIYAASSLQRGIPSTFS |
| | light | STIM005 light chain | GSGSGTDFTLTISSLQPEDFATYICQQSYGIP |
| | chain | | WVGQGTKVEIK |
| | sequence | | RTVAAPSVFIFPPSDEQLKSGTASVVCLLNN |
| | | | FYPREAKVQWKVDNALQSGNSQESVTEQD |
| | | | SKDSTYSLSSTLTLSKADYEKHKVYACEVT |
| | | | HQGLSSPVTKSFNRGEC |
| 448 | STIM00 | Nucleic acid | GACATCCAGATGACCCAGTCTCCATCCTC |
| | 5-full | sequence of | CCTGTCTGCATCTGTAGGAGACAGAGTCA |
| | light | STIM005 light chain | CCATCACTTGCCGGGCAAGTCAGAACATT |
| | chain | | AATAACTTTTTAAATTGGTATCAGCAGAA |
| | sequence | | AGAAGGGAAAGGCCCTAAGCTCCTGATCT |
| | | | ATGCAGCATCCAGTTTGCAAAGAGGGATA |
| | | | CCATCAACGTTCAGTGGCAGTGGATCTGG |
| | | | GACAGACTTCACTCTCACCATCAGCAGTC |
| | | | TGCAACCTGAAGATTTTGCAACTTACATCT |
| | | | GTCAACAGAGCTACGGTATCCCGTGGGTC |
| | | | GGCCAAGGGACCAAGGTGGAAATCAAAcgt |
| | | | acggtggccgctccctccgtgttcatcttc |
| | | | ccaccttccgacgagcagctgaagtccggc |
| | | | accgcttctgtcgtgtgcctgctgaacaac |
| | | | ttctacccccgcgaggccaaggtgcagtgg |
| | | | aaggtggacaacgccctgcagtccggcaac |
| | | | tcccaggaatccgtgaccgagcaggactcc |
| | | | aaggacagcacctactccctgtcctccacc |
| | | | ctgaccctgtccaaggccgactacgagaag |
| | | | cacaaggtgtacgcctgcgaagtgacccac |
| | | | cagggcctgtctagccccgtgaccaagtct |
| | | | ttcaaccggggcgagtgt |
| 449 | STIM00 | Amino acid | GFTFSDYF |
| | 6- | sequence of CDRH1 | |
| | CDRH1 | of STIM006 using | |
| | | IMGT | |
| 450 | STIM00 | Amino acid | ISSSGSTI |
| | 6- | sequence of CDRH2 | |
| | CDRH2 | of STIM006 using | |
| | | IMGT | |
| 451 | STIM00 | Amino acid | ARDHYDGSGIYPLYYYYGLDV |
| | 6- | sequence of CDRH3 | |
| | CDRH3 | of STIM006 using | |
| | | IMGT | |
| 452 | STIM00 | Amino acid | QVQLVESGGGLVKPGGSLRLSCAASGFTFS |
| | 6- | sequence of V_{H} of | DYFMSWIRQAPGKGLEWISYISSSGSTIYYA |
| | Heavy | STIM006 | DSVRGRFTISRDNAKYSLYLQMNSLRSEDT |
| | chain | | AVYYCARDHYDGSGIYPLYYYYGLDVWGQ |
| | variable | | GTTVTVSS |
| | region | | |
| 453 | STIM00 | Nucleic acid | CAGGTGCAGCTGGTGGAGTCTGGGGGAGG |
| | 6- | sequence of V_{H} of | CTTGGTCAAGCCTGGAGGGTCCCTGAGAC |
| | Heavy | STIM006 | TCTCCTGTGCAGCCTCTGGATTCACCTTCA |
| | chain | | GTGACTACTTCATGAGCTGGATCCGCCAG |
| | variable | | GCGCCAGGGAAGGGGCTGGAGTGGATTTC |
| | region | | ATACATTAGTTCTAGTGGTAGTACCATATA |
| | | | CTACGCAGACTCTGTGAGGGGCCGATTCA |
| | | | CCATCTCCAGGGACAACGCCAAGTACTCA |
| | | | CTGTATCTGCAAATGAACAGCCTGAGATC |
| | | | CGAGGACACGGCCGTGTATTACTGTGCGA |
| | | | GAGATCACTACGATGGTTCGGGGATTTAT |
| | | | CCCCTCTACTACTATTACGGTTTGGACGTC |
| | | | TGGGGCCAGGGGACCACGGTCACCGTCTC |
| | | | CTCA |
| 454 | STIM00 | Amino acid | QVQLVESGGGLVKPGGSLRLSCAASGFTFS |
| | 6-full | sequence of | DYFMSWIRQAPGKGLEWISYISSSGSTIYYA |
| | heavy | STIM006 heavy | DSVRGRFTISRDNAKYSLYLQMNSLRSEDT |
| | chain | chain | AVYYCARDHYDGSGIYPLYYYYGLDVWGQ |
| | sequence | | GTTVTVSSASTKGPSVFPLAPSSKSTSGGTA |
| | | | ALGCLVKDYFPEPVTVSWNSGALTSGVHTF |
| | | | PAVLQSSGLYSLSSVVTVPSSSLGTQTYICNV |
| | | | NHKPSNTKVDKKVEPKSCDKTHTCPPCPAP |
| | | | ELLGGPSVFLFPPKPKDTLMISRTPEVTCVV |
| | | | VDVSHEDPEVKFNWYVDGVEVHNAKTKPR |
| | | | EEQYNSTYRVVSVLTVLHQDWLNGKEYKC |
| | | | KVSNKALPAPIEKTISKAKGQPREPQVYTLP |
| | | | PSRDELTKNQVSLTCLVKGFYPSDIAVEWES |
| | | | NGQPENNYKTTPPVLDSDGSFFLYSKLTVD |
| | | | KSRWQQGNVFSCSVMHEALHNHYTQKSLS |
| | | | LSPGK |
| 455 | STIM00 | Nucleic acid | CAGGTGCAGCTGGTGGAGTCTGGGGGAGG |
| | 6-full | sequence of | CTTGGTCAAGCCTGGAGGGTCCCTGAGAC |
| | heavy | STIM006 heavy | TCTCCTGTGCAGCCTCTGGATTCACCTTCA |
| | chain | chain | GTGACTACTTCATGAGCTGGATCCGCCAG |
| | sequence | | GCGCCAGGGAAGGGGCTGGAGTGGATTTC |
| | | | ATACATTAGTTCTAGTGGTAGTACCATATA |
| | | | CTACGCAGACTCTGTGAGGGGCCGATTCA |
| | | | CCATCTCCAGGGACAACGCCAAGTACTCA |
| | | | CTGTATCTGCAAATGAACAGCCTGAGATC |
| | | | CGAGGACACGGCCGTGTATTACTGTGCGA |
| | | | GAGATCACTACGATGGTTCGGGGATTTAT |
| | | | CCCCTCTACTACTATTACGGTTTGGACGTC |
| | | | TGGGGCCAGGGGACCACGGTCACCGTCTC |
| | | | CTCAGCCAGCACCAAGGGCCCCTCTGTGT |
| | | | TCCCTCTGGCCCCTTCCAGCAAGTCCACCT |
| | | | CTGGCGGAACAGCCGCTCTGGGCTGCCTC |
| | | | GTGAAGGACTACTTCCCCGAGCCTGTGAC |
| | | | CGTGTCCTGGAACTCTGGCGCTCTGACCA |
| | | | GCGGAGTGCACACCTTCCCTGCTGTGCTG |
| | | | CAGTCCTCCGGCCTGTACTCCCTGTCCTCC |
| | | | GTCGTGACCGTGCCTTCCAGCTCTCTGGGC |
| | | | ACCCAGACCTACATCTGCAACGTGAACCA |
| | | | CAAGCCCTCCAACACCAAGGTGGACAAGA |
| | | | AGGTGGAACCCAAGTCCTGCGACAAGACC |
| | | | CACACCTGTCCCCCTTGTCCTGCCCCTGAA |
| | | | CTGCTGGGCGGACCTTCCGTGTTCCTGTTC |
| | | | CCCCCAAAGCCCAAGGACACCCTGATGAT |
| | | | CTCCCGGACCCCCGAAGTGACCTGCGTGG |
| | | | TGGTGGATGTGTCCCACGAGGACCCTGAA |
| | | | GTGAAGTTCAATTGGTACGTGGACGGCGT |
| | | | GGAAGTGCACAACGCCAAGACCAAGCCTA |
| | | | GAGAGGAACAGTACAACTCCACCTACCGG |
| | | | GTGGTGTCCGTGCTGACCGTGCTGCACCA |
| | | | GGATTGGCTGAACGGCAAAGAGTACAAGT |
| | | | GCAAGGTGTCCAACAAGGCCCTGCCTGCC |
| | | | CCCATCGAAAAGACCATCTCCAAGGCCAA |
| | | | GGGCCAGCCCCGGGAACCCCAGGTGTACA |
| | | | CACTGCCCCCTAGCAGGGACGAGCTGACC |
| | | | AAGAACCAGGTGTCCCTGACCTGTCTCGT |
| | | | GAAAGGCTTCTACCCCTCCGATATCGCCG |
| | | | TGGAATGGGAGTCCAACGGCCAGCCTGAG |
| | | | AACAACTACAAGACCACCCCCCCTGTGCT |
| | | | GGACTCCGACGGCTCATTCTTCCTGTACAG |
| | | | CAAGCTGACAGTGGACAAGTCCCGGTGGC |
| | | | AGCAGGGCAACGTGTTCTCCTGCTCCGTG |
| | | | ATGCACGAGGCCCTGCACAACCACTACAC |
| | | | CCAGAAGTCCCTGTCCCTGAGCCCCGGCA |
| | | | AGTGATGA |
| 456 | STIM00 | Amino acid | QSLLHSNGYNY |
| | 6- | sequence of CDRL1 | |
| | CDRL1 | of STIM006 using | |
| | | IMGT | |
| 457 | STIM00 | Amino acid | LGS |
| | 6- | sequence of CDRL2 | |
| | CDRL2 | of STIM006 using | |
| | | IMGT | |
| 458 | STIM00 | Amino acid | MQALQTPRS |
| | 6- | sequence of CDRL3 | |
| | CDRL3 | of STIM006 using | |
| | | IMGT | |
| 459 | STIM00 | Amino acid | IVMTQSPLSLPVTPGEPASISCRSSQSLLHSN |
| | 6-Light | sequence of V_{L} of | GYNYLDYYLQKPGQSPQLLIYLGSYRASGV |
| | chain | STIM006 | PDRFSGSGSGTDFTLKISRVEAEDVGVYYC |
| | variable | | MQALQTPRSFGQGTTLEIK |
| | region | | |
| 460 | STIM00 | Nucleic acid | ATTGTGATGACTCAGTCTCCACTCTCCCTA |
| | 6-Light | sequence of V_{L} of | CCCGTCACCCCTGGAGAGCCGGCCTCCAT |
| | chain | STIM006 | CTCCTGCAGGTCTAGTCAGAGCCTCCTGC |
| | variable | | ATAGTAATGGATACAACTATTTGGATTATT |
| | region | | ACCTGCAGAAGCCAGGGCAGTCTCCACAG |
| | | | CTCCTGATCTATTTGGGTTCTTATCGGGCC |
| | | | TCCGGGGTCCCTGACAGGTTCAGTGGCAG |
| | | | TGGATCAGGCACAGATTTTACACTGAAAA |
| | | | TCAGCAGAGTGGAGGCTGAGGATGTTGGG |
| | | | GTTTATTACTGCATGCAAGCTCTACAAACT |
| | | | CCTCGCAGTTTTGGCCAGGGGACCACGCT |
| | | | GGAGATCAAA |
| 461 | STIM00 | Amino acid | IVMTQSPLSLPVTPGEPASISCRSSQSLLHSN |
| | 6-full | sequence of | GYNYLDYYLQKPGQSPQLLIYLGSYRASGV |
| | light | STIM006 light chain | PDRFSGSGSGTDFTLKISRVEAEDVGVYYC |
| | chain | | MQALQTPRSFGQGTTLEIKRTVAAPSVFIFPP |
| | sequence | | SDEQLKSGTASVVCLLNNFYPREAKVQWK |
| | | | VDNALQSGNSQESVTEQDSKDSTYSLSSTLT |
| | | | LSKADYEKHKVYACEVTHQGLSSPVTKSFN |
| | | | RGEC |
| 462 | STIM00 | Nucleic acid | ATTGTGATGACTCAGTCTCCACTCTCCCTA |
| | 6-full | sequence of | CCCGTCACCCCTGGAGAGCCGGCCTCCAT |
| | light | STIM006 light chain | CTCCTGCAGGTCTAGTCAGAGCCTCCTGC |
| | chain | | ATAGTAATGGATACAACTATTTGGATTATT |
| | sequence | | ACCTGCAGAAGCCAGGGCAGTCTCCACAG |
| | | | CTCCTGATCTATTTGGGTTCTTATCGGGCC |
| | | | TCCGGGGTCCCTGACAGGTTCAGTGGCAG |
| | | | TGGATCAGGCACAGATTTTACACTGAAAA |
| | | | TCAGCAGAGTGGAGGCTGAGGATGTTGGG |
| | | | GTTTATTACTGCATGCAAGCTCTACAAACT |
| | | | CCTCGCAGTTTTGGCCAGGGGACCACGCT |
| | | | GGAGATCAAAcgtacggtggccgctccctcc |
| | | | gtgttcatcttcccaccttccgacgagcagct |
| | | | gaagtccggcaccgcttctgtcgtgtgcctgc |
| | | | tgaacaacttctacccccgcgaggccaaggtg |
| | | | gcagtggaaggtggacaacgccctgcagtccg |
| | | | gcaactcccaggaatccgtgaccagcaggact |
| | | | ccaaggacagcacctactccctgtcctccacc |
| | | | ctgaccctgtccaaggccgactacgagaagca |
| | | | caaggtgtacgcctgcgaagtgacccaccagg |
| | | | gcctgtctagccccgtgaccaagtctttcaac |
| | | | cggggcgagtgt |
| 463 | STIM00 | Amino acid | GFSLSTTGVG |
| | 7- | sequence of CDRH1 | |
| | CDRH1 | of STIM007 using | |
| | | IMGT | |
| 464 | STIM00 | Amino acid | IYWDDDK |
| | 7- | sequence of CDRH2 | |
| | CDRH2 | of STIM007 using | |
| | | IMGT | |
| 465 | STIM00 | Amino acid | THGYGSASYYHYGMDV |
| | 7- | sequence of CDRH3 | |
| | CDRH3 | of STIM007 using | |
| | | IMGT | |
| 466 | STIM00 | Amino acid | QITLKESGPTLVKPTQTLTLTCTFSGFSLSTT |
| | 7- | sequence of V_{H} of | GVGVGWIRQPPGKALEWLAVIYWDDDKRY |
| | Heavy | STIM007 | SPSLKSRLTITKDTSKNQVVLTMTNMDPVD |
| | chain | | TATYFCTHGYGSASYYHYGMDVWGQGTTV |
| | variable | | TVSS |
| | region | | |
| 467 | STIM00 | Nucleic acid | CAGATCACCTTGAAGGAGTCTGGTCCTAC |
| | 7- | sequence of V_{H} of | GCTGGTGAAACCCACACAGACCCTCACGC |
| | Heavy | STIM007 | TGACCTGCACCTTCTCTGGGTTCTCACTCA |
| | chain | | GCACTACTGGAGTGGGTGTGGGCTGGATC |
| | variable | | CGTCAGCCCCCAGGAAAGGCCCTGGAGTG |
| | region | | GCTTGCAGTCATTTATTGGGATGATGATA |
| | | | AGCGCTACAGCCCATCTCTGAAGAGCAGA |
| | | | CTCACCATCACCAAGGACACCTCCAAAAA |
| | | | CCAGGTGGTCCTTACAATGACCAACATGG |
| | | | ACCCTGTGGACACAGCCACATATTTCTGT |
| | | | ACACACGGATATGGTTCGGCGAGTTATTA |
| | | | CCACTACGGTATGGACGTCTGGGGCCAAG |
| | | | GGACCACGGTCACCGTCTCCTCA |
| 468 | STIM00 | Amino acid | QITLKESGPTLVKPTQTLTLTCTFSGFSLSTT |
| | 7-full | sequence of | GVGVGWIRQPPGKALEWLAVIYWDDDKRY |
| | heavy | STIM007 heavy | SPSLKSRLTITKDTSKNQVVLTMTNMDPVD |
| | chain | chain | TATYFCTHGYGSASYYHYGMDVWGQGTTV |
| | sequence | | TVSSASTKGPSVFPLAPSSKSTSGGTAALGC |
| | | | LVKDYFPEPVTVSWNSGALTSGVHTFPAVL |
| | | | QSSGLYSLSSVVTVPSSSLGTQTYICNVNHK |
| | | | PSNTKVDKKVEPKSCDKTHTCPPCPAPELLG |
| | | | GPSVFLFPPKPKDTLMISRTPEVTCVVVDVS |
| | | | HEDPEVKFNWYVDGVEVHNAKTKPREEQY |
| | | | NSTYRVVSVLTVLHQDWLNGKEYKCKVSN |
| | | | KALPAPIEKTISKAKGQPREPQVYTLPPSRDE |
| | | | LTKNQVSLTCLVKGFYPSDIAVEWESNGQP |
| | | | ENNYKTTPPVLDSDGSFFLYSKLTVDKSRW |
| | | | QQGNVFSCSVMHEALHNHYTQKSLSLSPGK |
| 469 | STIM00 | Nucleic acid | CAGATCACCTTGAAGGAGTCTGGTCCTAC |
| | 7-full | sequence of | GCTGGTGAAACCCACACAGACCCTCACGC |
| | heavy | STIM007 heavy | TGACCTGCACCTTCTCTGGGTTCTCACTCA |
| | chain | chain | GCACTACTGGAGTGGGTGTGGGCTGGATC |
| | sequence | | CGTCAGCCCCCAGGAAAGGCCCTGGAGTG |
| | | | GCTTGCAGTCATTTATTGGGATGATGATA |
| | | | AGCGCTACAGCCCATCTCTGAAGAGCAGA |
| | | | CTCACCATCACCAAGGACACCTCCAAAAA |
| | | | CCAGGTGGTCCTTACAATGACCAACATGG |
| | | | ACCCTGTGGACACAGCCACATATTTCTGT |
| | | | ACACACGGATATGGTTCGGCGAGTTATTA |
| | | | CCACTACGGTATGGACGTCTGGGGCCAAG |
| | | | GGACCACGGTCACCGTCTCCTCA |
| | | | GCCAGCACCAAGGGCCCCTCTGTGTTCCC |
| | | | TCTGGCCCCTTCCAGCAAGTCCACCTCTGG |
| | | | CGGAACAGCCGCTCTGGGCTGCCTCGTGA |
| | | | AGGACTACTTCCCCGAGCCTGTGACCGTG |
| | | | TCCTGGAACTCTGGCGCTCTGACCAGCGG |
| | | | AGTGCACACCTTCCCTGCTGTGCTGCAGTC |
| | | | CTCCGGCCTGTACTCCCTGTCCTCCGTCGT |
| | | | GACCGTGCCTTCCAGCTCTCTGGGCACCC |
| | | | AGACCTACATCTGCAACGTGAACCACAAG |
| | | | CCCTCCAACACCAAGGTGGACAAGAAGGT |
| | | | GGAACCCAAGTCCTGCGACAAGACCCACA |
| | | | CCTGTCCCCCTTGTCCTGCCCCTGAACTGC |
| | | | TGGGCGGACCTTCCGTGTTCCTGTTCCCCC |
| | | | CAAAGCCCAAGGACACCCTGATGATCTCC |
| | | | CGGACCCCCGAAGTGACCTGCGTGGTGGT |
| | | | GGATGTGTCCCACGAGGACCCTGAAGTGA |
| | | | AGTTCAATTGGTACGTGGACGGCGTGGAA |
| | | | GTGCACAACGCCAAGACCAAGCCTAGAGA |
| | | | GGAACAGTACAACTCCACCTACCGGGTGG |
| | | | TGTCCGTGCTGACCGTGCTGCACCAGGAT |
| | | | TGGCTGAACGGCAAAGAGTACAAGTGCAA |
| | | | GGTGTCCAACAAGGCCCTGCCTGCCCCCA |
| | | | TCGAAAAGACCATCTCCAAGGCCAAGGGC |
| | | | CAGCCCCGGGAACCCCAGGTGTACACACT |
| | | | GCCCCCTAGCAGGGACGAGCTGACCAAGA |
| | | | ACCAGGTGTCCCTGACCTGTCTCGTGAAA |
| | | | GGCTTCTACCCCTCCGATATCGCCGTGGA |
| | | | ATGGGAGTCCAACGGCCAGCCTGAGAACA |
| | | | ACTACAAGACCACCCCCCCTGTGCTGGAC |
| | | | TCCGACGGCTCATTCTTCCTGTACAGCAAG |
| | | | CTGACAGTGGACAAGTCCCGGTGGCAGCA |
| | | | GGGCAACGTGTTCTCCTGCTCCGTGATGC |
| | | | ACGAGGCCCTGCACAACCACTACACCCAG |
| | | | AAGTCCCTGTCCCTGAGCCCCGGCAAGTG |
| | | | ATGA |
| 470 | STIM00 | Amino acid | QSVTNY |
| | 7- | sequence of CDRL1 | |
| | CDRL1 | of STIM007 using | |
| | | IMGT | |
| 471 | STIM00 | Amino acid | DAS |
| | 7- | sequence of CDRL2 | |
| | CDRL2 | of STIM007 using | |
| | | IMGT | |
| 472 | STIM00 | Amino acid | QHRSNWPLT |
| | 7- | sequence of CDRL3 | |
| | CDRL3 | of STIM007 using | |
| | | IMGT | |
| 473 | STIM00 | Amino acid | EIVLTQSPATLSLSPGERATLSCRASQSVTNY |
| | 7-Light | sequence of V_{L} of | LAWHQQKPGQAPRLLIYDASNRATGIPARFS |
| | chain | STIM007 | GSGSGTDFTLTISSLEPEDFAVYYCQHRSNW |
| | variable | | PLTFGGGTKVEIK |
| | region | | |
| 474 | STIM00 | Nucleic acid | GAAATTGTATTGACACAGTCTCCAGCCAC |
| | 7-Light | sequence of V_{L} of | CCTGTCTTTGTCTCCAGGGGAAAGAGCCA |
| | chain | STIM007 | CCCTCTCCTGCAGGGCCAGTCAGAGTGTT |
| | variable | | ACCAACTACTTAGCCTGGCACCAACAGAA |
| | region | | ACCTGGCCAGGCTCCCAGGCTCCTCATCT |
| | | | ATGATGCATCCAACAGGGCCACTGGCATC |
| | | | CCAGCCAGGTTCAGTGGCAGTGGGTCTGG |
| | | | GACAGACTTCACTCTCACCATCAGCAGCC |
| | | | TAGAGCCTGAAGATTTTGCAGTTTATTACT |
| | | | GTCAGCACCGTAGCAACTGGCCTCTCACT |
| | | | TTCGGCGGAGGGACCAAGGTGGAGATCAA |
| | | | AC |
| 475 | STIM00 | Amino acid | EIVLTQSPATLSLSPGERATLSCRASQSVTNY |
| | 7-full | sequence of | LAWHQQKPGQAPRLLIYDASNRATGIPARFS |
| | light | STIM007 light chain | GSGSGTDFTLTISSLEPEDFAVYYCQHRSNW |
| | chain | | PLTFGGGTKVEIKRTVAAPSVFIFPPSDEQLK |
| | sequence | | SGTASVVCLLNNFYPREAKVQWKVDNALQ |
| | | | SGNSQESVTEQDSKDSTYSLSSTLTLSKADY |
| | | | EKHKVYACEVTHQGLSSPVTKSFNRGEC |
| 476 | STIM00 | Nucleic acid | GAAATTGTATTGACACAGTCTCCAGCCAC |
| | 7-full | sequence of | CCTGTCTTTGTCTCCAGGGGAAAGAGCCA |
| | light | STIM007 light chain | CCCTCTCCTGCAGGGCCAGTCAGAGTGTT |
| | chain | | ACCAACTACTTAGCCTGGCACCAACAGAA |
| | sequence | | ACCTGGCCAGGCTCCCAGGCTCCTCATCT |
| | | | ATGATGCATCCAACAGGGCCACTGGCATC |
| | | | CCAGCCAGGTTCAGTGGCAGTGGGTCTGG |
| | | | GACAGACTTCACTCTCACCATCAGCAGCC |
| | | | TAGAGCCTGAAGATTTTGCAGTTTATTACT |
| | | | GTCAGCACCGTAGCAACTGGCCTCTCACT |
| | | | TTCGGCGGAGGGACCAAGGTGGAGATCAA |
| | | | ACcgtacggtggccgctccctccgtgttcatct |
| | | | tcccaccttccgacgagcagctgaagtccggca |
| | | | ccgcttctgtcgtgtgcctgctgaacaacttct |
| | | | acccccgcgaggccaaggtgcagtggaaggtgg |
| | | | acaacgccctgcagtccggcaactcccaggaat |
| | | | ccgtgaccgagcaggactccaaggacagcacct |
| | | | actccctgtcctccaccctgaccctgtccaagg |
| | | | ccgactacgagaagcacaaggtgtacgcctgcg |
| | | | aagtgacccaccagggcctgtctagccccgtga |
| | | | ccaagtctttcaaccggggcgagtgt |
| 477 | STIM00 | Amino acid | GFSLSTSGVG |
| | 8- | sequence of CDRH1 | |
| | CDRH1 | of STIM008 using | |
| | | IMGT | |
| 478 | STIM00 | Amino acid | IYWDDDK |
| | 8- | sequence of CDRH2 | |
| | CDRH2 | of STIM008 using | |
| | | IMGT | |
| 479 | STIM00 | Amino acid | THGYGSASYYHYGMDV |
| | 8- | sequence of CDRH3 | |
| | CDRH3 | of STIM008 using | |
| | | IMGT | |
| 480 | STIM00 | Amino acid | QITLKESGPTLVKPTQTLTLTCTFSGFSLSTS |
| | 8- | sequence of V_{H} of | GVGVGWIRQPPGKALEWLAVIYWDDDKRY |
| | Heavy | STIM008 | SPSLKSRLTITKDTSKNQVVLTMTNMDPVD |
| | chain | | TATYFCTHGYGSASYYHYGMDVWGQGTTV |
| | variable | | TVSS |
| | region | | |
| 481 | STIM00 | Nucleic acid | CAGATCACCTTGAAGGAGTCTGGTCCTAC |
| | 8- | sequence of V_{H} of | GCTGGTGAAACCCACACAGACCCTCACGC |
| | Heavy | STIM008 | TGACCTGCACCTTCTCTGGGTTCTCACTCA |
| | chain | | GCACTAGTGGAGTGGGTGTGGGCTGGATC |
| | variable | | CGTCAGCCCCCAGGAAAGGCCCTGGAGTG |
| | region | | GCTTGCAGTCATTTATTGGGATGATGATA |
| | | | AGCGCTACAGCCCATCTCTGAAGAGCAGG |
| | | | CTCACCATCACCAAGGACACCTCCAAAAA |
| | | | CCAGGTGGTCCTTACAATGACCAACATGG |
| | | | ACCCTGTGGACACAGCCACATATTTCTGT |
| | | | ACACACGGATATGGTTCGGCGAGTTATTA |
| | | | CCACTACGGTATGGACGTCTGGGGCCAAG |
| | | | GGACCACGGTCACCGTCTCCTCA |
| 482 | STIM00 | Amino acid | QITLKESGPTLVKPTQTLTLTCTFSGFSLSTS |
| | 8-full | sequence of | GVGVGWIRQPPGKALEWLAVIYWDDDKRY |
| | heavy | STIM008 heavy | SPSLKSRLTITKDTSKNQVVLTMTNMDPVD |
| | chain | chain | TATYFCTHGYGSASYYHYGMDVWGQGTTV |
| | sequence | | TVSSASTKGPSVFPLAPSSKSTSGGTAALGC |
| | | | LVKDYFPEPVTVSWNSGALTSGVHTFPAVL |
| | | | QSSGLYSLSSVVTVPSSSLGTQTYICNVNHK |
| | | | PSNTKVDKKVEPKSCDKTHTCPPCPAPELLG |
| | | | GPSVFLFPPKPKDTLMISRTPEVTCVVVDVS |
| | | | HEDPEVKFNWYVDGVEVHNAKTKPREEQY |
| | | | NSTYRVVSVLTVLHQDWLNGKEYKCKVSN |
| | | | KALPAPIEKTISKAKGQPREPQVYTLPPSRDE |
| | | | LTKNQVSLTCLVKGFYPSDIAVEWESNGQP |
| | | | ENNYKTTPPVLDSDGSFFLYSKLTVDKSRW |
| | | | QQGNVFSCSVMHEALHNHYTQKSLSLSPGK |
| 483 | STIM00 | Nucleic acid | CAGATCACCTTGAAGGAGTCTGGTCCTAC |
| | 8-full | sequence of | GCTGGTGAAACCCACACAGACCCTCACGC |
| | heavy | STIM008 heavy | TGACCTGCACCTTCTCTGGGTTCTCACTCA |
| | chain | chain | GCACTAGTGGAGTGGGTGTGGGCTGGATC |
| | sequence | | CGTCAGCCCCCAGGAAAGGCCCTGGAGTG |
| | | | GCTTGCAGTCATTTATTGGGATGATGATA |
| | | | AGCGCTACAGCCCATCTCTGAAGAGCAGG |
| | | | CTCACCATCACCAAGGACACCTCCAAAAA |
| | | | CCAGGTGGTCCTTACAATGACCAACATGG |
| | | | ACCCTGTGGACACAGCCACATATTTCTGT |
| | | | ACACACGGATATGGTTCGGCGAGTTATTA |
| | | | CCACTACGGTATGGACGTCTGGGGCCAAG |
| | | | GGACCACGGTCACCGTCTCCTCAGCCAGC |
| | | | ACCAAGGGCCCCTCTGTGTTCCCTCTGGCC |
| | | | CCTTCCAGCAAGTCCACCTCTGGCGGAAC |
| | | | AGCCGCTCTGGGCTGCCTCGTGAAGGACT |
| | | | ACTTCCCCGAGCCTGTGACCGTGTCCTGG |
| | | | AACTCTGGCGCTCTGACCAGCGGAGTGCA |
| | | | CACCTTCCCTGCTGTGCTGCAGTCCTCCGG |
| | | | CCTGTACTCCCTGTCCTCCGTCGTGACCGT |
| | | | GCCTTCCAGCTCTCTGGGCACCCAGACCT |
| | | | ACATCTGCAACGTGAACCACAAGCCCTCC |
| | | | AACACCAAGGTGGACAAGAAGGTGGAAC |
| | | | CCAAGTCCTGCGACAAGACCCACACCTGT |
| | | | CCCCCTTGTCCTGCCCCTGAACTGCTGGGC |
| | | | GGACCTTCCGTGTTCCTGTTCCCCCCAAAG |
| | | | CCCAAGGACACCCTGATGATCTCCCGGAC |
| | | | CCCCGAAGTGACCTGCGTGGTGGTGGATG |
| | | | TGTCCCACGAGGACCCTGAAGTGAAGTTC |
| | | | AATTGGTACGTGGACGGCGTGGAAGTGCA |
| | | | CAACGCCAAGACCAAGCCTAGAGAGGAA |
| | | | CAGTACAACTCCACCTACCGGGTGGTGTC |
| | | | CGTGCTGACCGTGCTGCACCAGGATTGGC |
| | | | TGAACGGCAAAGAGTACAAGTGCAAGGT |
| | | | GTCCAACAAGGCCCTGCCTGCCCCCATCG |
| | | | AAAAGACCATCTCCAAGGCCAAGGGCCAG |
| | | | CCCCGGGAACCCCAGGTGTACACACTGCC |
| | | | CCCTAGCAGGGACGAGCTGACCAAGAACC |
| | | | AGGTGTCCCTGACCTGTCTCGTGAAAGGC |
| | | | TTCTACCCCTCCGATATCGCCGTGGAATGG |
| | | | GAGTCCAACGGCCAGCCTGAGAACAACTA |
| | | | CAAGACCACCCCCCCTGTGCTGGACTCCG |
| | | | ACGGCTCATTCTTCCTGTACAGCAAGCTG |
| | | | ACAGTGGACAAGTCCCGGTGGCAGCAGGG |
| | | | CAACGTGTTCTCCTGCTCCGTGATGCACGA |
| | | | GGCCCTGCACAACCACTACACCCAGAAGT |
| | | | CCCTGTCCCTGAGCCCCGGCAAGTGATGA |
| 484 | STIM00 | Amino acid | QSVTNY |
| | 8- | sequence of CDRL1 | |
| | CDRL1 | of STIM008 using | |
| | | IMGT | |
| 485 | STIM00 | Amino acid | DAS |
| | 8- | sequence of CDRL2 | |
| | CDRL2 | of STIM008 using | |
| | | IMGT | |
| 486 | STIM00 | Amino acid | QQRSNWPLT |
| | 8- | sequence of CDRL3 | |
| | CDRL3 | of STIM008 using | |
| | | IMGT | |
| 487 | STIM00 | Amino acid | EIVLTQSPATLSLSPGERATLSCRASQSVTNY |
| | 8-Light | sequence of V_{L} of | LAWHQQKPGQAPRLLIYDASNRATGIPARFS |
| | chain | STIM008 | GSGSGTDFTLTISSLEPEDFAVYYCQQRSNW |
| | variable | | PLTFGGGTKVEIK |
| | region | | |
| 488 | STIM00 | Nucleic acid | GAAATTGTGTTGACACAGTCTCCAGCCAC |
| | 8-Light | sequence of V_{L} of | CCTGTCTTTGTCTCCAGGGGAAAGAGCCA |
| | chain | STIM008 | CCCTCTCCTGCAGGGCCAGTCAGAGTGTT |
| | variable | | ACCAACTACTTAGCCTGGCACCAACAGAA |
| | region | | ACCTGGCCAGGCTCCCAGGCTCCTCATCT |
| | | | ATGATGCATCCAACAGGGCCACTGGCATC |
| | | | CCAGCCAGGTTCAGTGGCAGTGGGTCTGG |
| | | | GACAGACTTCACTCTCACCATCAGCAGCC |
| | | | TAGAGCCTGAAGATTTTGCAGTTTATTACT |
| | | | GTCAGCAGCGTAGCAACTGGCCTCTCACT |
| | | | TTCGGCGGAGGGACCAAGGTGGAGATCAA |
| | | | A |
| 489 | STIM00 | Amino acid | EIVLTQSPATLSLSPGERATLSCRASQSVTNY |
| | 8-full | sequence of | LAWHQQKPGQAPRLLIYDASNRATGIPARFS |
| | light | STIM008 light chain | GSGSGTDFTLTISSLEPEDFAVYYCQQRSNW |
| | chain | | PLTFGGGTKVEIKRTVAAPSVFIFPPSDEQLK |
| | sequence | | SGTASVVCLLNNFYPREAKVQWKVDNALQ |
| | | | SGNSQESVTEQDSKDSTYSLSSTLTLSKADY |
| | | | EKHKVYACEVTHQGLSSPVTKSFNRGEC |
| 490 | STIM00 | Nucleic acid | GAAATTGTGTTGACACAGTCTCCAGCCAC |
| | 8-full | sequence of | CCTGTCTTTGTCTCCAGGGGAAAGAGCCA |
| | light | STIM008 light chain | CCCTCTCCTGCAGGGCCAGTCAGAGTGTT |
| | chain | | ACCAACTACTTAGCCTGGCACCAACAGAA |
| | sequence | | ACCTGGCCAGGCTCCCAGGCTCCTCATCT |
| | | | ATGATGCATCCAACAGGGCCACTGGCATC |
| | | | CCAGCCAGGTTCAGTGGCAGTGGGTCTGG |
| | | | GACAGACTTCACTCTCACCATCAGCAGCC |
| | | | TAGAGCCTGAAGATTTTGCAGTTTATTACT |
| | | | GTCAGCAGCGTAGCAACTGGCCTCTCACT |
| | | | TTCGGCGGAGGGACCAAGGTGGAGATCAA |
| | | | Acgtacggtggccgctccctccgtgttcatcttcc |
| | | | caccttccgacgagcagctgaagtccggcaccgct |
| | | | tctgtcgtgtgcctgctgaacaacttctacccccg |
| | | | cgaggccaaggtgcagtggaaggtggacaacgccct |
| | | | gcagtccggcaactcccaggaatccgtgaccgagca |
| | | | ggactccaaggacagcacctactccctgtcctccac |
| | | | cctgaccctgtccaaggccgactacgagaagcacaa |
| | | | ggtgtacgcctgcgaagtgacccaccagggcctgtc |
| | | | tagccccgtgaccaagtctttcaaccggggcgagtgt |
| 491 | STIM00 | Amino acid | GFTFSDYY |
| | 9- | sequence of CDRH1 | |
| | CDRH1 | of STIM009 using | |
| | | IMGT | |
| 492 | STIM00 | Amino acid | ISSSGSTI |
| | 9- | sequence of CDRH2 | |
| | CDRH2 | of STIM009 using | |
| | | IMGT | |
| 493 | STIM00 | Amino acid | ARDFYDILTDSPYFYYGVDV |
| | 9- | sequence of CDRH3 | |
| | CDRH3 | of STIM009 using | |
| | | IMGT | |
| 494 | STIM00 | Amino acid | QVQLVESGGGLVKPGGSLRLSCAASGFTFS |
| | 9- | sequence of V_{H} of | DYYMSWIRQAPGKGLEWVSYISSSGSTIYY |
| | Heavy | STIM009 | ADSVKGRFTISRDNAKNSLYLQINSLRAEDT |
| | chain | | AVYYCARDFYDILTDSPYFYYGVDVWGQG |
| | variable | | TTVTVSS |
| | region | | |
| 495 | STIM00 | Nucleic acid | CAGGTGCAGCTGGTGGAGTCTGGGGGAGG |
| | 9- | sequence of V_{H} of | CTTGGTCAAGCCTGGAGGGTCCCTGAGAC |
| | Heavy | STIM009 | TCTCCTGTGCAGCCTCTGGATTCACCTTCA |
| | chain | | GTGACTACTACATGAGCTGGATCCGCCAG |
| | variable | | GCTCCAGGGAAGGGGCTGGAGTGGGTTTC |
| | region | | ATACATTAGTAGTAGTGGTAGTACCATAT |
| | | | ACTACGCAGACTCTGTGAAGGGCCGATTC |
| | | | ACCATCTCCAGGGACAACGCCAAGAACTC |
| | | | ACTGTATCTGCAAATTAACAGCCTGAGAG |
| | | | CCGAGGACACGGCCGTGTATTACTGTGCG |
| | | | AGAGATTTTTACGATATTTTGACTGATAGT |
| | | | CCGTACTTCTACTACGGTGTGGACGTCTGG |
| | | | GGCCAAGGGACCACGGTCACCGTCTCCTC |
| | | | A |
| 496 | STIM00 | Amino acid | QVQLVESGGGLVKPGGSLRLSCAASGFTFS |
| | 9-full | sequence of | DYYMSWIRQAPGKGLEWVSYISSSGSTIYY |
| | heavy | STIM009 heavy | ADSVKGRFTISRDNAKNSLYLQINSLRAEDT |
| | chain | chain | AVYYCARDFYDILTDSPYFYYGVDVWGQG |
| | sequence | | TTVTVSSASTKGPSVFPLAPSSKSTSGGTAAL |
| | | | GCLVKDYFPEPVTVSWNSGALTSGVHTFPA |
| | | | VLQSSGLYSLSSVVTVPSSSLGTQTYICNVN |
| | | | HKPSNTKVDKKVEPKSCDKTHTCPPCPAPEL |
| | | | LGGPSVFLFPPKPKDTLMISRTPEVTCVVVD |
| | | | VSHEDPEVKFNWYVDGVEVHNAKTKPREE |
| | | | QYNSTYRVVSVLTVLHQDWLNGKEYKCKV |
| | | | SNKALPAPIEKTISKAKGQPREPQVYTLPPSR |
| | | | DELTKNQVSLTCLVKGFYPSDIAVEWESNG |
| | | | QPENNYKTTPPVLDSDGSFFLYSKLTVDKSR |
| | | | WQQGNVFSCSVMHEALHNHYTQKSLSLSP |
| | | | GK |
| 497 | STIM00 | Nucleic acid | CAGGTGCAGCTGGTGGAGTCTGGGGGAGG |
| | 9-full | sequence of | CTTGGTCAAGCCTGGAGGGTCCCTGAGAC |
| | heavy | STIM009 heavy | TCTCCTGTGCAGCCTCTGGATTCACCTTCA |
| | chain | chain | GTGACTACTACATGAGCTGGATCCGCCAG |
| | sequence | | GCTCCAGGGAAGGGGCTGGAGTGGGTTTC |
| | | | ATACATTAGTAGTAGTGGTAGTACCATAT |
| | | | ACTACGCAGACTCTGTGAAGGGCCGATTC |
| | | | ACCATCTCCAGGGACAACGCCAAGAACTC |
| | | | ACTGTATCTGCAAATTAACAGCCTGAGAG |
| | | | CCGAGGACACGGCCGTGTATTACTGTGCG |
| | | | AGAGATTTTTACGATATTTTGACTGATAGT |
| | | | CCGTACTTCTACTACGGTGTGGACGTCTGG |
| | | | GGCCAAGGGACCACGGTCACCGTCTCCTC |
| | | | AGCCAGCACCAAGGGCCCCTCTGTGTTCC |
| | | | CTCTGGCCCCTTCCAGCAAGTCCACCTCTG |
| | | | GCGGAACAGCCGCTCTGGGCTGCCTCGTG |
| | | | AAGGACTACTTCCCCGAGCCTGTGACCGT |
| | | | GTCCTGGAACTCTGGCGCTCTGACCAGCG |
| | | | GAGTGCACACCTTCCCTGCTGTGCTGCAGT |
| | | | CCTCCGGCCTGTACTCCCTGTCCTCCGTCG |
| | | | TGACCGTGCCTTCCAGCTCTCTGGGCACCC |
| | | | AGACCTACATCTGCAACGTGAACCACAAG |
| | | | CCCTCCAACACCAAGGTGGACAAGAAGGT |
| | | | GGAACCCAAGTCCTGCGACAAGACCCACA |
| | | | CCTGTCCCCCTTGTCCTGCCCCTGAACTGC |
| | | | TGGGCGGACCTTCCGTGTTCCTGTTCCCCC |
| | | | CAAAGCCCAAGGACACCCTGATGATCTCC |
| | | | CGGACCCCCGAAGTGACCTGCGTGGTGGT |
| | | | GGATGTGTCCCACGAGGACCCTGAAGTGA |
| | | | AGTTCAATTGGTACGTGGACGGCGTGGAA |
| | | | GTGCACAACGCCAAGACCAAGCCTAGAGA |
| | | | GGAACAGTACAACTCCACCTACCGGGTGG |
| | | | TGTCCGTGCTGACCGTGCTGCACCAGGAT |
| | | | TGGCTGAACGGCAAAGAGTACAAGTGCAA |
| | | | GGTGTCCAACAAGGCCCTGCCTGCCCCCA |
| | | | TCGAAAAGACCATCTCCAAGGCCAAGGGC |
| | | | CAGCCCCGGGAACCCCAGGTGTACACACT |
| | | | GCCCCCTAGCAGGGACGAGCTGACCAAGA |
| | | | ACCAGGTGTCCCTGACCTGTCTCGTGAAA |
| | | | GGCTTCTACCCCTCCGATATCGCCGTGGA |
| | | | ATGGGAGTCCAACGGCCAGCCTGAGAACA |
| | | | ACTACAAGACCACCCCCCCTGTGCTGGAC |
| | | | TCCGACGGCTCATTCTTCCTGTACAGCAAG |
| | | | CTGACAGTGGACAAGTCCCGGTGGCAGCA |
| | | | GGGCAACGTGTTCTCCTGCTCCGTGATGC |
| | | | ACGAGGCCCTGCACAACCACTACACCCAG |
| | | | AAGTCCCTGTCCCTGAGCCCCGGCAAGTG |
| | | | ATGA |
| 498 | STIM00 | Amino acid | QSLLHSNGYNY |
| | 9- | sequence of CDRL1 | |
| | CDRL1 | of STIM009 using | |
| | | IMGT | |
| 499 | STIM00 | Amino acid | LGS |
| | 9- | sequence of CDRL2 | |
| | CDRL2 | of STIM009 using | |
| | | IMGT | |
| 500 | STIM00 | Amino acid | MQALQTPRT |
| | 9- | sequence of CDRL3 | |
| | CDRL3 | of STIM009 using | |
| | | IMGT | |
| 501 | STIM00 | Amino acid | DIVMTQSPLSLPVTPGEPASISCRSSQSLLHS |
| | 9-Light | sequence of V_{L} of | NGYNYLDWYLQKPGQSPQLLIYLGSNRASG |
| | chain | STIM009 | VPDRFSGSGSGTDFTLKISRVEAEDVGVYYC |
| | variable | | MQALQTPRTFGQGTKVEIK |
| | region | | |
| 502 | STIM00 | Nucleic acid | GATATTGTGATGACTCAGTCTCCACTCTCC |
| | 9-Light | sequence of V_{L} of | CTGCCCGTCACCCCTGGAGAGCCGGCCTC |
| | chain | STIM009 | CATCTCCTGCAGGTCTAGTCAGAGCCTCCT |
| | variable | | GCATAGTAATGGATACAACTATTTGGATT |
| | region | | GGTACCTGCAGAAGCCAGGGCAGTCTCCA |
| | | | CAGCTCCTGATCTATTTGGGTTCTAATCGG |
| | | | GCCTCCGGGGTCCCTGACAGGTTCAGTGG |
| | | | CAGTGGATCAGGCACAGATTTTACACTGA |
| | | | AAATCAGCAGAGTGGAGGCTGAGGATGTT |
| | | | GGGGTTTATTACTGCATGCAAGCTCTACA |
| | | | AACTCCTCGGACGTTCGGCCAAGGGACCA |
| | | | AGGTGGAAATCAAA |
| 503 | STIM00 | Amino acid | DIVMTQSPLSLPVTPGEPASISCRSSQSLLHS |
| | 9-full | sequence of | NGYNYLDWYLQKPGQSPQLLIYLGSNRASG |
| | light | STIM009 light chain | VPDRFSGSGSGTDFTLKISRVEAEDVGVYYC |
| | chain | | MQALQTPRTFGQGTKVEIKRTVAAPSVFIFP |
| | sequence | | PSDEQLKSGTASVVCLLNNFYPREAKVQWK |
| | | | VDNALQSGNSQESVTEQDSKDSTYSLSSTLT |
| | | | LSKADYEKHKVYACEVTHQGLSSPVTKSFN |
| | | | RGEC |
| 504 | STIM00 | Nucleic acid | GATATTGTGATGACTCAGTCTCCACTCTCC |
| | 9-full | sequence of | CTGCCCGTCACCCCTGGAGAGCCGGCCTC |
| | light | STIM009 light chain | CATCTCCTGCAGGTCTAGTCAGAGCCTCCT |
| | chain | | GCATAGTAATGGATACAACTATTTGGATT |
| | sequence | | GGTACCTGCAGAAGCCAGGGCAGTCTCCA |
| | | | CAGCTCCTGATCTATTTGGGTTCTAATCGG |
| | | | GCCTCCGGGGTCCCTGACAGGTTCAGTGG |
| | | | CAGTGGATCAGGCACAGATTTTACACTGA |
| | | | AAATCAGCAGAGTGGAGGCTGAGGATGTT |
| | | | GGGGTTTATTACTGCATGCAAGCTCTACA |
| | | | AACTCCTCGGACGTTCGGCCAAGGGACCA |
| | | | AGGTGGAAATCAAAcgtacggtggccgctccctccgtg |
| | | | ttcatcttcccaccttccgacgagcagctgaagtccgg |
| | | | caccgcttctgtcgtgtgcctgctgaacaacttctacc |
| | | | cccgcgaggccaaggtgcagtggaaggtggacaacgcc |
| | | | ctgcagtccggcaactcccaggaatccgtgaccgagca |
| | | | ggactccaaggacagcacctactccctgtcctccaccc |
| | | | tgaccctgtccaaggccgactacgagaagcacaaggtg |
| | | | tacgcctgcgaagtgacccaccagggcctgtctagccc |
| | | | cgtgaccaagtctttcaaccggggcgagtgt |
| 505 | Human | Amino acid | FTVTVPKDLYVVEYGSNMTIECKFPVEKQL |
| | PD-L1 | sequence of | DLAALIVYWEMEDKNIIQFVHGEEDLKVQH |
| | Flag His | KYPROT286 with | SSYRQRARLLKDQLSLGNAALQITDVKLQD |
| | (KYPRO | FLAG tag in bold | AGVYRCMISYGGADYKRITVKVNAPYNKIN |
| | T286) | and underlined and | QRILVVDPVTSEHELTCQAEGYPKAEVIWTS |
| | | histidine tag in bold | SDHQVLSGKTTTTNSKREEKLFNVTSTLRIN |
| | | | TTTNEIFYCTFRRLDPEENHTAELVIPELPLA |
| | | | HPPNERTIEGRDYKDDDDKHHHHHH |
| 506 | Mature | Mature amino acid | EINGSANYEMFIFHNGGVQILCKYPDIVQQF |
| | human | sequence of human | KMQLLKGGQILCDLTKTKGSGNTVSIKSLKF |
| | ICOS | ICOS | CHSQLSNNSVSFFLYNLDHSHANYYFCNLSI |
| | | | FDPPPFKVTLTGGYLHIYESQLCCQLKFWLPI |
| | | | GCAAFVVVCILGCILICWLTKKKYSSSVHDP |
| | | | NGEYMFMRAVNTAKKSRLTDVTL |
| 507 | Human | Amino acid | EINGSANYEMFIFHNGGVQILCKYPDIVQQF |
| | ICOS | sequence of human | KMQLLKGGQILCDLTKTKGSGNTVSIKSLKF |
| | extracell | ICOS extracellular | CHSQLSNNSVSFFLYNLDHSHANYYFCNLSI |
| | ular | domain | FDPPPFKVTLTGGYLHIYESQLCCQLKF |
| | domain | | |
| 508 | Human | Amino acid | MKSGLWYFFLFCLRIKVLTGEINGSANYEM |
| | ICOS | sequence of human | FIFHNGGVQILCKYPDIVQQFKMQLLKGGQI |
| | with | ICOS (signal peptide | LCDLTKTKGSGNTVSIKSLKFCHSQLSNNSV |
| | signal | is underlined) | SFFLYNLDHSHANYYFCNLSIFDPPPFKVTLT |
| | peptide | | GGYLHIYESQLCCQLKFWLPIGCAAFVVVCI |
| | | | LGCILICWLTKKKYSSSVHDPNGEYMFMRA |
| | | | VNTAKKSRLTDVTL |
| 509 | Isoform | Amino acid | The sequence of this isoform |
| | of human | sequence of a human | differs from the canonical |
| | ICOS | ICOS isoform | sequence in its cytoplasmic |
| | (Q9Y6W | | domain as follows: 168-199: |
| | 8-2) | | KYSSSVHDPNGEYMFMRAVNTAKKSRLTD |
| | | | VTLM |
| 510 | Mature | Mature amino acid | EINGSADHRMFSFHNGGVQISCKYPETVQQL |
| | mouse | sequence of mouse | KMRLFREREVLCELTKTKGSGNAVSIKNPM |
| | ICOS | ICOS | LCLYHLSNNSVSFFLNNPDSSQGSYYFCSLSI |
| | | | FDPPPFQERNLSGGYLHIYESQLCCQLKIVV |
| | | | QVTE |
| 511 | Mouse | Amino acid | EINGSADHRMFSFHNGGVQISCKYPETVQQL |
| | ICOS | sequence of the | KMRLFREREVLCELTKTKGSGNAVSIKNPM |
| | extra- | extracellular domain | LCLYHLSNNSVSFFLNNPDSSQGSYYFCSLSI |
| | cellular | of mouse ICOS | FDPPPFQERNLSGGYLHIYESQLCCQLK |
| | domain | | |
| 512 | Mouse | Amino acid | MGWSCIILFLVATATGVHSEINGSADHRMFS |
| | with | sequence of mouse | FHNGGVQISCKYPETVQQLKMRLFREREVL |
| | signal | ICOS (signal peptide | CELTKTKGSGNAVSIKNPMLCLYHLSNNSV |
| | peptide | is underlined) | SFFLNNPDSSQGSYYFCSLSIFDPPPFQERNLS |
| | ICOS | | GGYLHIYESQLCCQLKIVVQVTE |
| 513 | Cynomolgus | Amino acid | MKSGLWYFFLFCLHMKVLTG |
| | ICOS | sequence of | EINGSANYEM FIFHNGGVQI LCKYPDIVQQ |
| | with | cynomolgus ICOS | FKMQLLKGGQILCDLTKTKGSGNKVSIKSL |
| | signal | (signal peptide is | KFCHSQLSNNSVSFFLYNLD |
| | peptide | underlined) | RSHANYYFCNLSIFDPPPFKVTLTGGYLHIYE |
| | | | SQLCCQLKFWLPIGCATF |
| | | | VVVCIFGCILICWLTKKKYSSTVHDPNGEYM |
| | | | FMRAVNTAKKSRLTGTTP |
| 514 | Cynomolgus | Amino acid | EINGSANYEMFIFHNGGVQILCKYPDIVQQF |
| | ICOS | sequence of | KMQLLKGGQILCDLTKTKG |
| | extra- | cynomolgus ICOS | SGNKVSIKSLKFCHSQLSNNSVSFFLYNLDR |
| | cell | extracellular domain | SHANYYFCNLSIFDPPPFK |
| | ular | | VTLTGGYLHIYESQLCCQLK |
| | domain | | |
| 515 | Human | Amino acid | DTQEKEVRAMVGSDVELSCACPEGSRFDLN |
| | ICOS | sequence of human | DVYVYWQTSESKTVVTYHIPQNSSLENVDS |
| | ligand | ICOS ligand | RYRNRALMSPAGMLRGDFSLRLFNVTPQDE |
| | | comprising | QKFHCLVLSQSLGFQEVLSVEVTLHVAANF |
| | | extracellular domain | SVPVVSAPHSPSQDELTFTCTSINGYPRPNV |
| | | | YWINKTDNSLLDQALQNDTVFLNMRGLYDV |
| | | | VSVLRIARTPSVNIGCCIENVLLQQNLTVGS |
| | | | QTGNDIGERDKITENPVSTGEKNAATWS |
| 516 | Human | Amino acid | MRLGSPGLLFLLFSSLRADTQEKEVRAMVG |
| | ICOS | sequence of human | SDVELSCACPEGSRFDLNDVYVYWQTSESK |
| | ligand | ICOS ligand | TVVTYHIPQNSSLENVDSRYRNRALMSPAG |
| | | including signal | MLRGDFSLRLFNVTPQDEQKFHCLVLSQSL |
| | | peptide | GFQEVLSVEVTLHVAANFSVPVVSAPHSPSQ |
| | | | DELTFTCTSINGYPRPNVYWINKTDNSLLDQ |
| | | | ALQNDTVFLNMRGLYDVVSVLRIARTPSVN |
| | | | IGCCIENVLLQQNLTVGSQTGNDIGERDKITE |
| | | | NPVSTGEKNAATWSILAVLCLLVVVAVAIG |
| | | | WVCRDRCLQHSYAGAWAVSPETELTGHV |

SEQ ID NO: 610 ICOSL-Fc
DTQEKEVRAMVGSDVELSCACPEGSRFDLNDVYVYWQTSESKTVVTYHIPQNSSLE
NVDSRYRNRALMSPAGMLRGDFSLRLFNVTPQDEQKFHCLVLSQSLGFQEVLSVEV
TLHVAANFSVPVVSAPHSPSQDELTFTCTSINGYPRPNVYWINKTDNSLLDQALQND
TVFLNMRGLYDVVSVLRIARTPSVNIGCCIENVLLQQNLTVGSQTGNDIGERDKITEN
PVSTGEKNAATWSDIEGRMDPKSCDKTHTCPPCPAPELLGGPSVFLFPPKPKDTLMIS
RTPEVTCVVVDVSHEDPEVKFNWYVDGVEVHNAKTKPREEQYNSTYRVVSVLTVL
HQDWLNGKEYKCKVSNKALPAPIEKTISKAKGQPREPQVYTLPPSRDELTKNQVSLT
CLVKGFYPSDIAVEWESNGQPENNYKTTPPVLDSDGSFFLYSKLTVDKSRWQQGNV
FSCSVMHEALHNHYTQKSLSLSPGK
Linker is underlined and in bold. Sequence
preceding linker is human ICOSL (B7-H2).
Sequence following linker is human IgG1 Fc.

| | | | | |
|---|---|---|---|---|
| 517 | C-terminal amino | | Amino acids 21 to | LQMILNGINNYKNPKLTAMLTFKFY |
| | acid sequence of | | 133 of hIL-2 with | MPKKATELKHLQCLEEELKPLEEVLN |
| | hIL-2 | | R38W mutation | LAQSKNFHLRPRDLISNINVIVLELK |
| | | | (bold & | GSETTFMCEYADETATIVEFLNRWIT |
| | | | underlined) | FCQSIISTLT |
| 518 | C-terminal amino | | Amino acids 21 to | LQMILNGINNYKNPKLTQMLTFKFY |
| | acid sequence of | | 133 of hIL-2 with | MPKKATELKHLQCLEEELKPLEEVLN |
| | hIL-2 | | R38Q mutation | LAQSKNFHLRPRDLISNINVIVLELKG |
| | | | (bold & | SETTFMCEYADETATIVEFLNRWITFC |
| | | | underlined) | QSIISTLT |
| 519 | STIM002- | | Nucleic acid | GATATTGTGATGACTCAGTCTCCAC |
| | Corrected Light | | sequence of | TCTCCCTGCCCGTCACCCCTGGAGA |
| | chain variable | | corrected VL of | GCCGGCCTCCATCTCCTGCAGGTCT |
| | region | | STIM002 | AGTCAGAGCCTCCTGCATAGTGATG |
| | | | | GATACAACTATTTGGATTGGTACCT |
| | | | | GCAGAAGCCAGGGCAGTCTCCACAG |
| | | | | CTCCTGATCTATTTGGGTTCTACTC |
| | | | | GGGCCTCCGGGTTCCCTGACAGGTT |
| | | | | CAGTGGCAGTGGATCAGGCACAGA |
| | | | | TTTTACACTGAAAATCAGCAGAGTG |
| | | | | GAGGCTGAGGATGTTGGGGTTTATT |
| | | | | ACTGCATGCAAGCTCTACAAACTCC |
| | | | | GCTCAGTTTTGGCCAGGGGACCAAG |
| | | | | CTGGAGATCAAA |
| 520 | STIM002- | | Nucleic acid | GATATTGTGATGACTCAGTCTCCAC |
| | Corrected full | | sequence of | TCTCCCTGCCCGTCACCCCTGGAGA |
| | light chain | | corrected STIM002 | GCCGGCCTCCATCTCCTGCAGGTCT |
| | sequence | | light chain | AGTCAGAGCCTCCTGCATAGTGATG |
| | | | | GATACAACTATTTGGATTGGTACCT |
| | | | | GCAGAAGCCAGGGCAGTCTCCACAG |
| | | | | CTCCTGATCTATTTGGGTTCTACTC |
| | | | | GGGCCTCCGGGTTCCCTGACAGGTT |
| | | | | CAGTGGCAGTGGATCAGGCACAGA |
| | | | | TTTTACACTGAAAATCAGCAGAGTG |
| | | | | GAGGCTGAGGATGTTGGGGTTTATT |
| | | | | ACTGCATGCAAGCTCTACAAACTCC |
| | | | | GCTCAGTTTTGGCCAGGGGACCAAG |
| | | | | CTGGAGATCAAAcgtacggtggccgct |
| | | | | ccctccgtgttcatcttcccaccttcc |
| | | | | gacgagcagctgaagtccggcaccgct |
| | | | | tctgtcgtgtgcctgctgaacaacttc |
| | | | | tacccccgcgaggccaaggtgcagtgg |
| | | | | aaggtggacaacgccctgcagtccggc |
| | | | | aactcccaggaatccgtgaccgagcag |
| | | | | gactccaaggacagcacctactccctg |
| | | | | tcctccaccctgaccctgtccaaggcc |
| | | | | gactacgagaagcacaaggtgtacgcc |
| | | | | tgcgaagtgacccaccagggcctgtct |
| | | | | agccccgtgaccaagtctttcaaccgg |
| | | | | ggcgagtgt |
| 521 | STIM003- | | Nucleic acid | GAGGTGCAGCTGGTGGAGTCTGGG |
| | Corrected heavy | | sequence of | GGAGGTGTGGTACGGCCTGGGGGG |
| | chain variable | | corrected VH of | TCCCTGAGACTCTCCTGTGTAGCCT |
| | region | | STIM003 | CTGGAGTCACCTTTGATGATTATGG |
| | | | | CATGAGCTGGGTCCGCCAAGCTCCA |
| | | | | GGGAAGGGGCTGGAGTGGGTCTCT |
| | | | | GGTATTAATTGGAATGGTGGCGACA |
| | | | | CAGATTATTCAGACTCTGTGAAGGG |
| | | | | CCGATTCACCATCTCCAGAGACAAC |
| | | | | GCCAAGAACTCCCTGTATCTACAAA |
| | | | | TGAATAGTCTGAGAGCCGAGGACA |
| | | | | CGGCCTTGTATTACTGTGCGAGGGA |
| | | | | TTTCTATGGTTCGGGGAGTTATTATC |
| | | | | ACGTTCCTTTTGACTACTGGGGCCA |
| | | | | GGGAATCCTGGTCACCGTCTCCTCA |
| 522 | STIM003- | | Nucleic acid | GAGGTGCAGCTGGTGGAGTCTGGG |
| | Corrected full | | sequence of | GGAGGTGTGGTACGGCCTGGGGGG |
| | heavy chain | | corrected STIM003 | TCCCTGAGACTCTCCTGTGTAGCCT |
| | sequence | | heavy chain | CTGGAGTCACCTTTGATGATTATGG |
| | | | | CATGAGCTGGGTCCGCCAAGCTCCA |
| | | | | GGGAAGGGGCTGGAGTGGGTCTCT |
| | | | | GGTATTAATTGGAATGGTGGCGACA |
| | | | | CAGATTATTCAGACTCTGTGAAGGG |
| | | | | CCGATTCACCATCTCCAGAGACAAC |
| | | | | GCCAAGAACTCCCTGTATCTACAAA |
| | | | | TGAATAGTCTGAGAGCCGAGGACA |
| | | | | CGGCCTTGTATTACTGTGCGAGGGA |
| | | | | TTTCTATGGTTCGGGGAGTTATTATC |
| | | | | ACGTTCCTTTTGACTACTGGGGCCA |
| | | | | GGGAATCCTGGTCACCGTCTCCTCA |
| | | | | GCCAGCACCAAGGGCCCCTCTGTGT |
| | | | | TCCCTCTGGCCCCTTCCAGCAAGTC |
| | | | | CACCTCTGGCGGAACAGCCGCTCTG |
| | | | | GGCTGCCTCGTGAAGGACTACTTCC |
| | | | | CCGAGCCTGTGACCGTGTCCTGGAA |
| | | | | CTCTGGCGCTCTGACCAGCGGAGTG |
| | | | | CACACCTTCCCTGCTGTGCTGCAGT |
| | | | | CCTCCGGCCTGTACTCCCTGTCCTCC |
| | | | | GTCGTGACCGTGCCTTCCAGCTCTC |
| | | | | TGGGCACCCAGACCTACATCTGCAA |
| | | | | CGTGAACCACAAGCCCTCCAACACC |
| | | | | AAGGTGGACAAGAAGGTGGAACCC |
| | | | | AAGTCCTGCGACAAGACCCACACCT |
| | | | | GTCCCCCTTGTCCTGCCCCTGAACT |
| | | | | GCTGGGCGGACCTTCCGTGTTCCTG |
| | | | | TTCCCCCCAAAGCCCAAGGACACCC |
| | | | | TGATGATCTCCCGGACCCCCGAAGT |
| | | | | GACCTGCGTGGTGGTGGATGTGTCC |
| | | | | CACGAGGACCCTGAAGTGAAGTTCA |
| | | | | ATTGGTACGTGGACGGCGTGGAAGT |
| | | | | GCACAACGCCAAGACCAAGCCTAG |
| | | | | AGAGGAACAGTACAACTCCACCTAC |
| | | | | CGGGTGGTGTCCGTGCTGACCGTGC |
| | | | | TGCACCAGGATTGGCTGAACGGCAA |
| | | | | AGAGTACAAGTGCAAGGTGTCCAA |
| | | | | CAAGGCCCTGCCTGCCCCCATCGAA |
| | | | | AAGACCATCTCCAAGGCCAAGGGC |
| | | | | CAGCCCCGGGAACCCCAGGTGTACA |
| | | | | CACTGCCCCCTAGCAGGGACGAGCT |
| | | | | GACCAAGAACCAGGTGTCCCTGACC |
| | | | | TGTCTCGTGAAAGGCTTCTACCCCT |
| | | | | CCGATATCGCCGTGGAATGGGAGTC |
| | | | | CAACGGCCAGCCTGAGAACAACTA |
| | | | | CAAGACCACCCCCCCTGTGCTGGAC |
| | | | | TCCGACGGCTCATTCTTCCTGTACA |
| | | | | GCAAGCTGACAGTGGACAAGTCCC |
| | | | | GGTGGCAGCAGGGCAACGTGTTCTC |
| | | | | CTGCTCCGTGATGCACGAGGCCCTG |
| | | | | CACAACCACTACACCCAGAAGTCCC |
| | | | | TGTCCCTGAGCCCCGGCAAGTGATG |
| | | | | A |
| 523 | Human | IGH | Human Heavy | gcctccaccaagggcccatcggtcttccccctggcaccct |
| | IgG1 | G1* | Chain Constant | cctccaagagcacctctgggggcacagcggccctgggct |
| | constant | 03 | Region | gcctggtcaaggactacttccccgaaccggtgacggtgtc |
| | region | | (IGHG1*03) | gtggaactcaggcgccctgaccagcggcgtgcacacctt |
| | | | Nucleotide | cccggctgtcctacagtcctcaggactctactccctcagca |
| | | | Sequence | gcgtggtgaccgtgccctccagcagcttgggcacccaga |
| | | | | cctacatctgcaacgtgaatcacaagcccagcaacaccaa |
| | | | | ggtggacaagagagttgagcccaaatcttgtgacaaaact |
| | | | | cacacatgcccaccgtgcccagcacctgaactcctgggg |
| | | | | ggaccgtcagtcttcctcttccccccaaaacccaaggaca |
| | | | | ccctcatgatctcccggacccctgaggtcacatgcgtggt |
| | | | | ggtggacgtgagccacgaagaccctgaggtcaagttcaa |
| | | | | ctggtacgtggacggcgtggaggtgcataatgccaagac |
| | | | | aaagccgcgggaggagcagtacaacagcacgtaccgtg |
| | | | | tggtcagcgtcctcaccgtcctgcaccaggactggctgaa |
| | | | | tggcaaggagtacaagtgcaaggtctccaacaaagccct |
| | | | | cccagcccccatcgagaaaaccatctccaaagccaaagg |
| | | | | gcagccccgagaaccacaggtgtacaccctgcccccatc |
| | | | | ccgggaggagatgaccaagaaccaggtcagcctgacct |
| | | | | gcctggtcaaaggcttctatcccagcgacatcgccgtgga |
| | | | | gtgggagagcaatgggcagccggagaacaactacaaga |
| | | | | ccacgcctcccgtgctggactccgacggctccttcttcctct |
| | | | | atagcaagctcaccgtggacaagagcaggtggcagcag |
| | | | | gggaacgtcttctcatgctccgtgatgcatgaggctctgca |
| | | | | caaccactacacgcagaagagcctctccctgtccccgggt |
| | | | | aaa |
| 524 | | | Human Heavy | A S T K G P S V F P L A P S S K S T S G |
| | | | Chain Constant | G T A A L G C L V K D Y F P E P V T V |
| | | | Region | S W N S G A L T S G V H T F P A V L Q |
| | | | (IGHG1*03) | S S G L Y S L S S V V T V P S S S L G T |
| | | | Protein | Q T Y I C N V N H K P S N T K V D K R |
| | | | Sequence | V E P K S C D K T H T C P P C P A P E |
| | | | | L L G G P S V F L F P P K P K D T L M I |
| | | | | S R T P E V T C V V V D V S H E D P E |
| | | | | V K F N W Y V D G V E V H N A K T K |
| | | | | P R E E Q Y N S T Y R V V S V L T V L |
| | | | | H Q D W L N G K E Y K C K V S N K A |
| | | | | L P A P I E K T I S K A K G Q P R E P Q |
| | | | | V Y T L P P S R E E M T K N Q V S L T |
| | | | | C L V K G F Y P S D I A V E W E S N G |
| | | | | Q P E N N Y K T T P P V L D S D G S F |
| | | | | F L Y S K L T V D K S R W Q Q G N V |
| | | | | F S C S V M H E A L H N H Y T Q K S L |
| | | | | S L S P G K |
| 525 | Human | IGH | Human Heavy | gcctccaccaagggcccatcggtcttccccctggcaccct |
| | IgG1 | G1* | Chain Constant | cctccaagagcacctctgggggcacagcggccctgggct |
| | constant | 04 | Region | gcctggtcaaggactacttccccgaaccggtgacggtgtc |
| | region | | (IGHG1*04) | gtggaactcaggcgccctgaccagcggcgtgcacacctt |
| | | | Nucleotide | cccggctgtcctacagtcctcaggactctactccctcagca |
| | | | Sequence | gcgtggtgaccgtgccctccagcagcttgggcacccaga |
| | | | | cctacatctgcaacgtgaatcacaagcccagcaacaccaa |
| | | | | ggtggacaagaaagttgagcccaaatcttgtgacaaaact |
| | | | | cacacatgcccaccgtgcccagcacctgaactcctgggg |
| | | | | ggaccgtcagtcttcctcttccccccaaaacccaaggaca |
| | | | | ccctcatgatctcccggacccctgaggtcacatgcgtggt |
| | | | | ggtggacgtgagccacgaagaccctgaggtcaagttcaa |
| | | | | ctggtacgtggacggcgtggaggtgcataatgccaagac |
| | | | | aaagccgcgggaggagcagtacaacagcacgtaccgtg |
| | | | | tggtcagcgtcctcaccgtcctgcaccaggactggctgaa |
| | | | | tggcaaggagtacaagtgcaaggtctccaacaaagccct |
| | | | | cccagcccccatcgagaaaaccatctccaaagccaaagg |
| | | | | gcagccccgagaaccacaggtgtacaccctgcccccatc |
| | | | | ccgggatgagctgaccaagaaccaggtcagcctgacctg |
| | | | | cctggtcaaaggcttctatcccagcgacatcgccgtggag |
| | | | | tgggagagcaatgggcagccggagaacaactacaagacca |
| | | | | cgcctcccgtgctggactccgacggctccttcttcctcta |
| | | | | cagcaagctcaccgtggacaagagcaggtggcagcagggg |
| | | | | aacatcttctcatgctccgtgatgcatgaggctctgcac |
| | | | | aaccactacacgcagaagagcctctccctgtctccgggta |
| | | | | aa |
| 526 | | | Human Heavy | ASTKGPSVFPLAPSSKSTSGGTAALGC |
| | | | Chain Constant | LVKDYFPEPVTVSWNSGALTSGVHTF |
| | | | Region | PAVLQSSGLYSLSSVVTVPSSSLGTQT |
| | | | (IGHG1*O4) | YICNVNHKPSNTKVDKKVEPKSCDKT |
| | | | Protein Sequence | HTCPPCPAPELLGGPSVFLFPPKPKDT |
| | | | | LMISRTPEVTCVVVDVSHEDPEVKFN |
| | | | | WYVDGVEVHNAKTKPREEQYNSTYR |
| | | | | VVSVLTVLHQDWLNGKEYKCKVSN |
| | | | | KALPAPIEKTISKAKGQPREPQVYTLP |
| | | | | PSRDELTKNQVSLTCLVKGFYPSDIA |
| | | | | VEWESNGQPENNYKTTPPVLDSDGSF |
| | | | | FLYSKLTVDKSRWQQGNIFSCSVMHE |
| | | | | ALHNHYTQKSLSLSPGK |
| 527 | Human | IGH | Human Heavy | gcctccaccaagggcccatcggtcttccccctggcgccct |
| | IgG2 | G2* | Chain Constant | gctccaggagcacctccgagagcacagccgccctgggc |
| | constant | 01 | Region | tgcctggtcaaggactacttccccgaaccggtgacggtgt |
| | region | & | (IGHG2*01) | cgtggaactcaggcgctctgaccagcggcgtgcacacctt |
| | | IGH | Nucleotide | cccagctgtcctacagtcctcaggactctactccctcagca |
| | | G2* | Sequence | gcgtggtgaccgtgccctccagcaacttcggcacccaga |
| | | 03 | | cctacacctgcaacgtagatcacaagcccagcaacacca |
| | | & | | aggtggacaagacagttgagcgcaaatgttgtgtcgagtg |
| | | IGH | | cccaccgtgcccagcaccacctgtggcaggaccgtcagtc |
| | | G2* | | ttcctcttccccccaaaacccaaggacaccctcatgatct |
| | | 05 | | cccggacccctgaggtcacgtgcgtggtggtggacgtgag |
| | | | | ccacgaagaccccgaggtccagttcaactggtacgtgga |
| | | | | cggcgtggaggtgcataatgccaagacaaagccacggg |
| | | | | aggagcagttcaacagcacgttccgtgtggtcagcgtcct |
| | | | | caccgttgtgcaccaggactggctgaacggcaaggagta |
| | | | | caagtgcaaggtctccaacaaaggcctcccagcccccat |
| | | | | cgagaaaaccatctccaaaaccaaagggcagccccgag |
| | | | | aaccacaggtgtacaccctgcccccatcccgggaggaga |
| | | | | tgaccaagaaccaggtcagcctgacctgcctggtcaaag |
| | | | | gcttctaccccagcgacatcgccgtggagtgggagagca |
| | | | | atgggcagccggagaacaactacaagaccacacctccca |
| | | | | tgctggactccgacggctccttcttcctctacagcaagct |
| | | | | caccgtggacaagagcaggtggcagcaggggaacgtcttc |
| | | | | tcatgctccgtgatgcatgaggctctgcacaaccactaca |
| | | | | cgcagaagagcctctccctgtctccgggtaaa |
| 528 | | | Human Heavy | ASTKGPSVFPLAPCSRSTSESTAALGC |
| | | | Chain Constant | LVKDYFPEPVTVSWNSGALTSGVHTF |
| | | | Region | PAVLQSSGLYSLSSVVTVPSSNFGTQT |
| | | | (IGHG2*01) | YTCNVDHKPSNTKVDKTVERKCCVE |
| | | | Protein Sequence | CPPCPAPPVAGPSVFLFPPKPKDTLMI |
| | | | | SRTPEVTCVVVDVSHEDPEVQFNWY |
| | | | | VDGVEVHNAKTKPREEQFNSTFRVVS |
| | | | | VLTVVHQDWLNGKEYKCKVSNKGL |
| | | | | PAPIEKTISKTKGQPREPQVYTLPPSRE |
| | | | | EMTKNQVSLTCLVKGFYPSDIAVEWE |
| | | | | SNGQPENNYKTTPPMLDSDGSFFLYS |
| | | | | KLTVDKSRWQQGNVFSCSVMHEALH |
| | | | | NHYTQKSLSLSPGK |
| 529 | Human | IGH | Human Heavy | GCCTCCACCAAGGGCCCATCGGTCT |
| | IgG2 | G2* | Chain Constant | TCCCCCTGGCGCCCTGCTCCAGGAG |
| | constant | 02 | Region | CACCTCCGAGAGCACAGCGGCCCTG |
| | region | | (IGHG2*02) | GGCTGCCTGGTCAAGGACTACTTCC |
| | | | Nucleotide | CCGAACCGGTGACGGTGTCGTGGAA |
| | | | Sequence | CTCAGGCGCTCTGACCAGCGGCGTG |
| | | | | CACACCTTCCCGGCTGTCCTACAGT |
| | | | | CCTCAGGACTCTACTCCCTCAGCAG |
| | | | | CGTGGTGACCGTGACCTCCAGCAAC |
| | | | | TTCGGCACCCAGACCTACACCTGCA |
| | | | | ACGTAGATCACAAGCCCAGCAACA |
| | | | | CCAAGGTGGACAAGACAGTTGAGC |
| | | | | GCAAATGTTGTGTCGAGTGCCCACC |
| | | | | GTGCCCAGCACCACCTGTGGCAGGA |
| | | | | CCGTCAGTCTTCCTCTTCCCCCCAAA |
| | | | | ACCCAAGGACACCCTCATGATCTCC |
| | | | | CGGACCCCTGAGGTCACGTGCGTGG |
| | | | | TGGTGGACGTGAGCCACGAAGACC |
| | | | | CCGAGGTCCAGTTCAACTGGTACGT |
| | | | | GGACGGCATGGAGGTGCATAATGC |
| | | | | CAAGACAAAGCCACGGGAGGAGCA |
| | | | | GTTCAACAGCACGTTCCGTGTGGTC |
| | | | | AGCGTCCTCACCGTCGTGCACCAGG |
| | | | | ACTGGCTGAACGGCAAGGAGTACA |
| | | | | AGTGCAAGGTCTCCAACAAAGGCCT |
| | | | | CCCAGCCCCCATCGAGAAAACCATC |
| | | | | TCCAAAACCAAAGGGCAGCCCCGA |
| | | | | GAACCACAGGTGTACACCCTGCCCC |
| | | | | CATCCCGGGAGGAGATGACCAAGA |
| | | | | ACCAGGTCAGCCTGACCTGCCTGGT |
| | | | | CAAAGGCTTCTACCCCAGCGACATC |
| | | | | GCCGTGGAGTGGGAGAGCAATGGG |
| | | | | CAGCCGGAGAACAACTACAAGACC |
| | | | | ACACCTCCCATGCTGGACTCCGACG |
| | | | | GCTCCTTCTTCCTCTACAGCAAGCTC |
| | | | | ACCGTGGACAAGAGCAGGTGGCAG |
| | | | | CAGGGGAACGTCTTCTCATGCTCCG |
| | | | | TGATGCATGAGGCTCTGCACAACCA |
| | | | | CTACACACAGAAGAGCCTCTCCCTG |
| | | | | TCTCCGGGTAAA |
| 530 | | | Human Heavy | ASTKGPSVFPLAPCSRSTSESTAALGC |
| | | | Chain Constant | LVKDYFPEPVTVSWNSGALTSGVHTF |
| | | | Region | PAVLQSSGLYSLSSVVTVTSSNFGTQT |
| | | | (IGHG2*02) | YTCNVDHKPSNTKVDKTVERKCCVE |
| | | | Protein Sequence | CPPCPAPPVAGPSVFLFPPKPKDTLMI |
| | | | | SRTPEVTCVVVDVSHEDPEVQFNWY |
| | | | | VDGMEVHNAKTKPREEQFNSTFRVV |
| | | | | SVLTVVHQDWLNGKEYKCKVSNKG |
| | | | | LPAPIEKTISKTKGQPREPQVYTLPPSR |
| | | | | EEMTKNQVSLTCLVKGFYPSDIAVEW |
| | | | | ESNGQPENNYKTTPPMLDSDGSFFLY |
| | | | | SKLTVDKSRWQQGNVFSCSVMHEAL |
| | | | | HNHYTQKSLSLSPGK |
| 531 | Human | IGH | Human Heavy | gcctccaccaagggcccatcggtcttccccctggcgccct |
| | IgG2 | G2* | Chain Constant | gctccaggagcacctccgagagcacagcggccctgggc |
| | constant | 04 | Region | tgcctggtcaaggactacttccccgaaccggtgacggtgt |
| | region | | (IGHG2*04) | cgtggaactcaggcgctctgaccagcggcgtgcacacctt |
| | | | Nucleotide | cccagctgtcctacagtcctcaggactctactccctcagca |
| | | | Sequence | gcgtggtgaccgtgccctccagcagcttgggcacccaga |
| | | | | cctacacctgcaacgtagatcacaagcccagcaacacca |
| | | | | aggtggacaagacagttgagcgcaaatgttgtgtcgagtg |
| | | | | cccaccgtgcccagcaccacctgtggcaggaccgtcagt |
| | | | | cttcctcttccccccaaaacccaaggacaccctcatgatctc |
| | | | | ccggacccctgaggtcacgtgcgtggtggtggacgtgag |
| | | | | ccacgaagaccccgaggtccagttcaactggtacgtgga |
| | | | | cggcgtggaggtgcataatgccaagacaaagccacggg |
| | | | | aggagcagttcaacagcacgttccgtgtggtcagcgtcct |
| | | | | caccgttgtgcaccaggactggctgaacggcaaggagta |
| | | | | caagtgcaaggtctccaacaaaggcctcccagcccccat |
| | | | | cgagaaaaccatctccaaaaccaaagggcagccccgag |
| | | | | aaccacaggtgtacaccctgcccccatcccgggaggaga |
| | | | | tgaccaagaaccaggtcagcctgacctgcctggtcaaag |
| | | | | gcttctaccccagcgacatcgccgtggagtgggagagca |
| | | | | atgggcagccggagaacaactacaagaccacacctccca |
| | | | | tgctggactccgacggctccttcttcctctacagcaagctca |
| | | | | ccgtggacaagagcaggtggcagcaggggaacgtcttct |
| | | | | catgctccgtgatgcatgaggctctgcacaaccactacac |
| | | | | gcagaagagcctctccctgtctccgggtaaa |
| 532 | | | Human Heavy | ASTKGPSVFPLAPCSRSTSESTAALGC |
| | | | Chain Constant | LVKDYFPEPVTVSWNSGALTSGVHTF |
| | | | Region | PAVLQSSGLYSLSSVVTVPSSSLGTQT |
| | | | (IGHG2*04) | YTCNVDHKPSNTKVDKTVERKCCVE |
| | | | Protein Sequence | CPPCPAPPVAGPSVFLFPPKPKDTLMI |
| | | | | SRTPEVTCVVVDVSHEDPEVQFNWY |
| | | | | VDGVEVHNAKTKPREEQFNSTFRVVS |
| | | | | VLTVVHQDWLNGKEYKCKVSNKGL |
| | | | | PAPIEKTISKTKGQPREPQVYTLPPSRE |
| | | | | EMTKNQVSLTCLVKGFYPSDIAVEWE |
| | | | | SNGQPENNYKTTPPMLDSDGSFFLYS |
| | | | | KLTVDKSRWQQGNVFSCSVMHEALH |
| | | | | NHYTQKSLSLSPGK |
| 533 | Human | IGH | Human Heavy | GCCTCCACCAAGGGCCCATCGGTCT |
| | IgG2 | G2* | Chain Constant | TCCCCCTGGCGCCCTGCTCCAGGAG |
| | constant | 06 | Region | CACCTCCGAGAGCACAGCGGCCCTG |
| | region | | (IGHG2*06) | GGCTGCCTGGTCAAGGACTACTTCC |
| | | | Nucleotide | CCGAACCGGTGACGGTGTCGTGGAA |
| | | | Sequence | CTCAGGCGCTCTGACCAGCGGCGTG |
| | | | | CACACCTTCCCGGCTGTCCTACAGT |
| | | | | CCTCAGGACTCTACTCCCTCAGCAG |
| | | | | CGTGGTGACCGTGCCCTCCAGCAAC |
| | | | | TTCGGCACCCAGACCTACACCTGCA |
| | | | | ACGTAGATCACAAGCCCAGCAACA |
| | | | | CCAAGGTGGACAAGACAGTTGAGC |
| | | | | GCAAATGTTGTGTCGAGTGCCCACC |
| | | | | GTGCCCAGCACCACCTGTGGCAGGA |
| | | | | CCGTCAGTCTTCCTCTTCCCCCCAAA |
| | | | | ACCCAAGGACACCCTCATGATCTCC |
| | | | | CGGACCCCTGAGGTCACGTGCGTGG |
| | | | | TGGTGGACGTGAGCCACGAAGACC |
| | | | | CCGAGGTCCAGTTCAACTGGTACGT |
| | | | | GGACGGCGTGGAGGTGCATAATGC |
| | | | | CAAGACAAAGCCACGGGAGGAGCA |
| | | | | GTTCAACAGCACGTTCCGTGTGGTC |
| | | | | AGCGTCCTCACCGTCGTGCACCAGG |
| | | | | ACTGGCTGAACGGCAAGGAGTACA |
| | | | | AGTGCAAGGTCTCCAACAAAGGCCT |
| | | | | CCCAGCCCCCATCGAGAAAACCATC |
| | | | | TCCAAAACCAAAGGGCAGCCCCGA |
| | | | | GAACCACAGGTGTACACCCTGCCCC |
| | | | | CATCCCGGGAGGAGATGACCAAGA |
| | | | | ACCAGGTCAGCCTGACCTGCCTGGT |
| | | | | CAAAGGCTTCTACCCCAGCGACATC |
| | | | | TCCGTGGAGTGGGAGAGCAATGGG |
| | | | | CAGCCGGAGAACAACTACAAGACC |
| | | | | ACACCTCCCATGCTGGACTCCGACG |
| | | | | GCTCCTTCTTCCTCTACAGCAAGCTC |
| | | | | ACCGTGGACAAGAGCAGGTGGCAG |
| | | | | CAGGGGAACGTCTTCTCATGCTCCG |
| | | | | TGATGCATGAGGCTCTGCACAACCA |
| | | | | CTACACACAGAAGAGCCTCTCCCTG |
| | | | | TCTCCGGGTAAA |
| 534 | | | Human Heavy | ASTKGPSVFPLAPCSRSTSESTAALGC |
| | | | Chain Constant | LVKDYFPEPVTVSWNSGALTSGVHTFP |
| | | | Region | AVLQSSGLYSLSSVVTVPSSNFGTQT |
| | | | (IGHG2*06) | YTCNVDHKPSNTKVDKTVERKCCVEC |
| | | | Protein Sequence | PPCPAPPVAGPSVFLFPPKPKDTLMI |
| | | | | SRTPEVTCVVVDVSHEDPEVQFNWY |
| | | | | VDGVEVHNAKTKPREEQFNSTFRVVS |
| | | | | VLTVVHQDWLNGKEYKCKVSNKGLPA |
| | | | | PIEKTISKTKGQPREPQVYTLPPSRE |
| | | | | EMTKNQVSLTCLVKGFYPSDISVEWE |
| | | | | SNGQPENNYKTTPPMLDSDGSFFLYS |
| | | | | KLTVDKSRWQQGNVFSCSVMHEALH |
| | | | | NHYTQKSLSLSPGK |
| 535 | Human Cλ | IGL | Cλ Light Chain | GGTCAGCCCAAGGCTGCCCCCTCGG |
| | constant | C7* | Constant Region | TCACTCTGTTCCCACCCTCCTCTGAG |
| | region | 03 | (IGLC7*03) | GAGCTTCAAGCCAACAAGGCCACA |
| | | | Nucleotide | CTGGTGTGTCTCGTAAGTGACTTCA |
| | | | Sequence | ACCCGGGAGCCGTGACAGTGGCCTG |
| | | | | GAAGGCAGATGGCAGCCCCGTCAA |
| | | | | GGTGGGAGTGGAGACCACCAAACC |
| | | | | CTCCAAACAAAGCAACAACAAGTA |
| | | | | TGCGGCCAGCAGCTACCTGAGCCTG |
| | | | | ACGCCCGAGCAGTGGAAGTCCCAC |
| | | | | AGAAGCTACAGCTGCCGGGTCACGC |
| | | | | ATGAAGGGAGCACCGTGGAGAAGA |
| | | | | CAGTGGCCCCTGCAGAATGCTCT |
| 536 | | | Cλ Light Chain | GQPKAAPSVTLFPPSSEELQANKATL |
| | | | Constant Region | VCLVSDFNPGAVTVAWKADGSPVKV |
| | | | (IGLC7*03) | GVETTKPSKQSNNKYAASSYLSLTPE |
| | | | Amino Acid | QWKSHRSYSCRVTHEGSTVEKTVAP |
| | | | Sequence | AECS |
| 537 | Human | IGH | WT human IgG1 | gcctccaccaagggcccatcggtcttccccctggcaccct |
| | WT IgG1 | G1* | nucleotide | cctccaagagcacctctgggggcacagcggccctgggct |
| | constant | 01 | sequence #2 | gcctggtcaaggactacttccccgaaccggtgacggtgtc |
| | region | & | | gtggaactcaggcgccctgaccagcggcgtgcacacctt |
| | | IGH | | cccggctgtcctacagtcctcaggactctactccctcagca |
| | | G1* | | gcgtggtgaccgtgccctccagcagcttgggcacccaga |
| | | 05 | | cctacatctgcaacgtgaatcacaagcccagcaacaccaa |
| | | (IgG | | ggtggacaagaaagttgagcccaaatcttgtgacaaaact |
| | | 1) | | cacacatgcccaccgtgcccagcacctgaactcctgggg |
| | | | | ggaccgtcagtcttcctcttccccccaaaacccaaggaca |
| | | | | ccctcatgatctcccggacccctgaggtcacatgcgtggt |
| | | | | ggtggacgtgagccacgaagaccctgaggtcaagttcaa |
| | | | | ctggtacgtggacggcgtggaggtgcataatgccaagac |
| | | | | aaagccgcgggaggagcagtacaacagcacgtaccgg |
| | | | | gtggtcagcgtcctcaccgtcctgcaccaggactggctga |
| | | | | atggcaaggagtacaagtgcaaggtctccaacaaagccc |
| | | | | tcccagcccccatcgagaaaaccatctccaaagccaaag |
| | | | | ggcagccccgagaaccacaggtgtacaccctgcccccat |
| | | | | cccgggatgagctgaccaagaaccaggtcagcctgacct |
| | | | | gcctggtcaaaggcttctatcccagcgacatcgccgtgga |
| | | | | gtgggagagcaatgggcagccggagaacaactacaaga |
| | | | | ccacgcctcccgtgctggactccgacggctccttcttcctct |
| | | | | acagcaagctcaccgtggacaagagcaggtggcagcag |
| | | | | gggaacgtcttctcatgctccgtgatgcatgaggctctgca |
| | | | | caaccactacacgcagaagagcctctccctgtctccgggt |
| | | | | aaa |
| 538 | Human Cλ | IGL | Cλ Light Chain | GQPKAAPSVTLFPPSSEELQANKATL |
| | constant | C2* | Constant Region | VCLISDFYPGAVTVAWKADSSPVKA |
| | region | 01 | Amino Acid | GVETTTPSKQSNNKYAASSYLSLTPE |
| | | | Sequence #2- | QWKSHRSYSCQVTHEGSTVEKTVAP |
| | | | Encoded by | TECS |
| | | | nucleotide | |
| | | | sequence version | |
| | | | A & B | |

TABLE S3
SEQ ID NOS: 539-562

Sequence

hIgG1 FIT-Ig bispecific 1a

| | | |
|---|---|---|
| Antibody A | anti-ICOS | |
| | STIM003 | |
| Antibody B | anti-PD-L1 | |
| | 84G09 | |
| FIT-Ig | SEQ ID NO: 539 | DIQMTQSPASLSASLGETVTIQCRASEDIYSGLAWFQQKPGKSPQLLIYGA |
| Construct #1 | | SSLQDGVPSRFSGSGSGTQYSLKISSMQTEDEGVYFCQQGLKYPPTFGSGT |
| | | KLEIKRTVAAPSVFIFPPSDEQLKSGTASVVCLLNNFYPREAKVQWKVDNA |
| | | LQSGNSQESVTEQDSKDSTYSLSSTLTLSKADYEKHKVYACEVTHQGLSSP |
| | | VTKSFNRGECEVQLVESGGGLTQPGKSLKLSCEASGFTFSSFTMHWVRQSP |
| | | GKGLEWVAFIRSGSGIVFYADAVRGRFTISRDNAKNLLFLQMNDLKSEDTA |
| | | MYYCARRPLGHNTFDSWGQGTLVTVSSASTKGPSVFPLAPSSKSTSGGTAA |
| | | LGCLVKDYFPEPVTVSWNSGALTSGVHTFPAVLQSSGLYSLSSVVTVPSSS |
| | | LGTQTYICNVNHKPSNTKVDKKVEPKSCDKTHTCPPCPAPELLGGPSVFLF |
| | | PPKPKDTLMISRTPEVTCVVVDVSHEDPEVKFNWYVDGVEVHNAKTKPREE |
| | | QYNSTYRVVSVLTVLHQDWLNGKEYKCKVSNKALPAPIEKTISKAKGQPRE |
| | | PQVYTLPPSRDELTKNQVSLTCLVKGFYPSDIAVEWESNGQPENNYKTTPP |
| | | VLDSDGSFFLYSKLTVDKSRWQQGNVFSCSVMHEALHNHYTQKSLSLSPGK |
| FIT-Ig | SEQ ID NO: 540 | EVQLVESGGGLVQPGRSLKLSCAASGFTFSDFYMAWVRQAPKKGLEWVASI |
| Construct #2 | | SYEGSSTYYGDSVMGRFTISRDNAKSTLYLQMNSLRSEDTATYYCARQREA |
| | | NWEDWGQGVMVTVSSASTKGPSVFPLAPSSKSTSGGTAALGCLVKDYFPEP |
| | | VTVSWNSGALTSGVHTFPAVLQSSGLYSLSSVVTVPSSSLGTQTYICNVNH |
| | | KPSNTKVDKKV |
| FIT-Ig | SEQ ID NO: 541 | DIVMTQSPSSLAVSPGEKVTMTCKSSQSLYYSGVKENLLAWYQQKPGQSPK |
| Construct #3 | | LLIYYASIRFTGVPDRFTGSGSGTDYTLTITSVQAEDMGQYFCQQGINNPL |
| | | TFGDGTKLEIKRTVAAPSVFIFPPSDEQLKSGTASVVCLLNNFYPREAKVQ |
| | | WKVDNALQSGNSQESVTEQDSKDSTYSLSSTLTLSKADYEKHKVYACEVTH |
| | | QGLSSPVTKSFNRGEC |

hIgG1 FIT-Ig bispecific 1b

| | | |
|---|---|---|
| Antibody A | anti-PD-L1 | |
| | 84G09 | |
| Antibody B | anti-ICOS | |
| | STIM003 | |
| FIT-Ig | SEQ ID NO: 542 | DIVMTQSPSSLAVSPGEKVTMTCKSSQSLYYSGVKENLLAWYQQKPGQSPK |
| Construct #1 | | LLIYYASIRFTGVPDRFTGSGSGTDYTLTITSVQAEDMGQYFCQQGINNPL |
| | | TFGDGTKLEIKRTVAAPSVFIFPPSDEQLKSGTASVVCLLNNFYPREAKVQ |
| | | WKVDNALQSGNSQESVTEQDSKDSTYSLSSTLTLSKADYEKHKVYACEVTH |
| | | QGLSSPVTKSFNRGECEVQLVESGGGLVQPGRSLKLSCAASGFTFSDFYMA |
| | | WVRQAPKKGLEWVASISYEGSSTYYGDSVMGRFTISRDNAKSTLYLQMNSL |
| | | RSEDTATYYCARQREANWEDWGQGVMVTVSSASTKGPSVFPLAPSSKSTSG |
| | | GTAALGCLVKDYFPEPVTVSWNSGALTSGVHTFPAVLQSSGLYSLSSVVTV |
| | | PSSSLGTQTYICNVNHKPSNTKVDKKVEPKSCDKTHTCPPCPAPELLGGPS |
| | | VFLFPPKPKDTLMISRTPEVTCVVVDVSHEDPEVKFNWYVDGVEVHNAKTK |
| | | PREEQYNSTYRVVSVLTVLHQDWLNGKEYKCKVSNKALPAPIEKTISKAKG |
| | | QPREPQVYTLPPSRDELTKNQVSLTCLVKGFYPSDIAVEWESNGQPENNYK |
| | | TTPPVLDSDGSFFLYSKLTVDKSRWQQGNVFSCSVMHEALHNHYTQKSLSL |
| | | SPGK |
| FIT-Ig | SEQ ID NO: 543 | EVQLVESGGGLTQPGKSLKLSCEASGFTFSSFTMHWVRQSPGKGLEWVAFI |
| Construct #2 | | RSGSGIVFYADAVRGRFTISRDNAKNLLFLQMNDLKSEDTAMYYCARRPLG |
| | | HNTFDSWGQGTLVTVSSASTKGPSVFPLAPSSKSTSGGTAALGCLVKDYFP |
| | | EPVTVSWNSGALTSGVHTFPAVLQSSGLYSLSSVVTVPSSSLGTQTYICNV |
| | | NHKPSNTKVDKKV |
| FIT-Ig | SEQ ID NO: 544 | DIQMTQSPASLSASLGETVTIQCRASEDIYSGLAWFQQKPGKSPQLLIYGA |
| Construct #3 | | SSLQDGVPSRFSGSGSGTQYSLKISSMQTEDEGVYFCQQGLKYPPTFGSGT |
| | | KLEIKRTVAAPSVFIFPPSDEQLKSGTASVVCLLNNFYPREAKVQKVDNAW |
| | | LQSGNSQESVTEQDSKDSTYSLSSTLTLSKADYEKHKVYACEVTHQGLSSP |
| | | VTKSFNRGEC |

hIgG1 FIT-Ig bispecific 2a

| | | |
|---|---|---|
| Antibody A | anti-ICOS | |
| | STIM001 | |
| Antibody B | anti-PD-L1 | |
| | 1D05 | |
| FIT-Ig | SEQ ID NO: 545 | DIQMTQSPASLSASLGETVTIQCRASEDIYSGLAWFQQKPGKSPQLLIYGA |
| Construct #1 | | SSLQDGVPSRFSGSGSGTQYSLKISSMQTEDEGVYFCQQGLKYPPTFGSGT |
| | | KLEIKRTDAAPTVSIFPPSSEQLTSGGASVVCFLNNFYPKDINVKWKIDGS |
| | | ERQNGVLNSWTDQDSKDSTYSMSSTLTLTKDEYERHNSYTCEATHKTSTSP |
| | | IVKSFNRNECEVQLVESGGGLTQPGKSLKLSCEASGFTFSSFTMHWVRQSP |
| | | GKGLEWVAFIRSGSGIVFYADAVRGRFTISRDNAKNLLFLQMNDLKSEDTA |
| | | MYYCARRPLGHNTFDSWGQGTLVTVSSAKTTAPSVYPLAPVCGDTTGSSVT |
| | | LGCLVKGYFPEPVTLTWNSGSLSSGVHTFPAVLQSDLYTLSSSVTVTSSTW |
| | | PSQSITCNVAHPASSTKVDKKIEPRGPTIKPCPPCKCPAPNLLGGPSVFIF |
| | | PPKIKDVLMISLSPIVTCVVVDVSEDDPDVQISWFVNNVEVHTAQTQTHRE |
| | | DYNSTLRVVSALPIQHQDWMSGKEFKCKVNNKDLPAPIERTISKPKGSVRA |
| | | PQVYVLPPPEEEMTKKQVTLTCMVTDFMPEDIYVEWTNNGKTELNYKNTEP |
| | | VLDSDGSYFMYSKLRVEKKNWVERNSYSCSVVHEGLHNHHTTKSFSRTPGK |
| FIT-Ig | SEQ ID NO: 546 | EVQLVESGGGLVQPGRSLKLSCAASGFTFSDFYMAWVRQAPKKGLEWVASI |
| Construct #2 | | SYEGSSTYYGDSVMGRFTISRDNAKSTLYLQMNSLRSEDTATYYCARQREA |
| | | NWEDWGQGVMVTVSSAKTTAPSVYPLAPVCGDTTGSSVTLGCLVKGYFPEP |
| | | VTLTWNSGSLSSGVHTFPAVLQSDLYTLSSSVTVTSSTWPSQSITCNVAHP |
| | | ASSTKVDKKI |
| FIT-Ig | SEQ ID NO: 547 | DIVMTQSPSSLAVSPGEKVTMTCKSSQSLYYSGVKENLLAWYQQKPGQSPK |
| Construct #3 | | LLIYYASIRFTGVPDRFTGSGSGTDYTLTITSVQAEDMGQYFCQQGINNPL |
| | | TFGDGTKLEIKRTDAAPTVSIFPPSSEQLTSGGASVVCFLNNFYPKDINVK |
| | | WKIDGSERQNGVLNSWTDQDSKDSTYSMSSTLTLTKDEYERHNSYTCEATH |
| | | KTSTSPIVKSFNRNEC |

hIgG1 FIT-Ig bispecific 2b

| | | |
|---|---|---|
| Antibody A | anti-PD-L1 | |
| | 1D05 | |
| Antibody B | anti-ICOS | |
| | STIM001 | |
| FIT-Ig | SEQ ID NO: 548 | DIVMTQSPSSLAVSPGEKVTMTCKSSQSLYYSGVKENLLAWYQQKPGQSPK |
| Construct #1 | | LLIYYASIRFTGVPDRFTGSGSGTDYTLTITSVQAEDMGQYFCQQGINNPL |
| | | TFGDGTKLEIKRTDAAPTVSIFPPSSEQLTSGGASVVCFLNNFYPKDINVK |
| | | WKIDGSERQNGVLNSWTDQDSKDSTYSMSSTLTLTKDEYERHNSYTCEATH |
| | | KTSTSPIVKSFNRNECEVQLVESGGGLVQPGRSLKLSCAASGFTFSDFYMA |
| | | WVRQAPKKGLEWVASISYEGSSTYYGDSVMGRFTISRDNAKSTLYLQMNSL |
| | | RSEDTATYYCARQREANWEDWGQGVMVTVSSAKTTAPSVYPLAPVCGDTTG |
| | | SSVTLGCLVKGYFPEPVTLTWNSGSLSSGVHTFPAVLQSDLYTLSSSVTVT |
| | | SSTWPSQSITCNVAHPASSTKVDKKIEPRGPTIKPCPPCKCPAPNLLGGPS |
| | | VFIFPPKIKDVLMISLSPIVTCVVVDVSEDDPDVQISWFVNNVEVHTAQTQ |
| | | THREDYNSTLRVVSALPIQHQDWMSGKEFKCKVNNKDLPAPIERTISKPKG |
| | | SVRAPQVYVLPPPEEEMTKKQVTLTCMVTDFMPEDIYVEWTNNGKTELNYK |
| | | NTEPVLDSDGSYFMYSKLRVEKKNWVERNSYSCSVVHEGLHNHHTTKSFSR |
| | | TPGK |
| FIT-Ig | SEQ ID NO: 549 | EVQLVESGGGLTQPGKSLKLSCEASGFTFSSFTMHWVRQSPGKGLEWVAFI |
| Construct #2 | | RSGSGIVFYADAVRGRFTISRDNAKNLLFLQMNDLKSEDTAMYYCARRPLG |
| | | HNTFDSWGQGTLVTVSSAKTTAPSVYPLAPVCGDTTGSSVTLGCLVKGYFP |
| | | EPVTLTWNSGSLSSGVHTFPAVLQSDLYTLSSSVTVTSSTWPSQSITCNVA |
| | | HPASSTKVDKKI |
| FIT-Ig | SEQ ID NO: 550 | DIQMTQSPASLSASLGETVTIQCRASEDIYSGLAWFQQKPGKSPQLLIYGA |
| Construct #3 | | SSLQDGVPSRFSGSGSGTQYSLKISSMQTEDEGVYFCQQGLKYPPTFGSGT |
| | | KLEIKRTDAAPTVSIFPPSSEQLTSGGASVVCFLNNFYPKDINVKWKIDGS |
| | | ERQNGVLNSWTDQDSKDSTYSMSSTLTLTKDEYERHNSYTCEATHKTSTSP |
| | | IVKSFNRNEC |

hIgG1 FIT-Ig bispecific 3a

| | | |
|---|---|---|
| Antibody A | anti-ICOS | |
| | STIM003 | |
| Antibody B | anti-PD-L1 | |
| | 1D05 | |
| FIT-Ig | SEQ ID NO: 551 | DIQMTQSPASLSASLGETVTIQCRASEDIYSGLAWFQQKPGKSPQLLIYGA |
| Construct #1 | | SSLQDGVPSRFSGSGSGTQYSLKISSMQTEDEGVYFCQQGLKYPPTFGSGT |
| | | KLEIKRTVAAPSVFIFPPSDEQLKSGTASVVCLLNNFYPREAKVQWKVDNA |
| | | LQSGNSQESVTEQDSKDSTYSLSSTLTLSKADYEKHKVYACEVTHQGLSSP |
| | | VTKSFNRGECEVQLVESGGGLTQPGKSLKLSCEASGFTFSSFTMHWVRQSP |
| | | GKGLEWVAFIRSGSGIVFYADAVRGRFTISRDNAKNLLFLQMNDLKSEDTA |
| | | MYYCARRPLGHNTFDSWGQGTLVTVSSASTKGPSVFPLAPSSKSTSGGTAA |
| | | LGCLVKDYFPEPVTVSWNSGALTSGVHTFPAVLQSSGLYSLSSVVTVPSSS |
| | | LGTQTYICNVNHKPSNTKVDKKVEPKSCDKTHTCPPNLLGGPSVFIFPPKI |
| | | KDVLMISLSPIVTCVVVDVSEDDPDVQISWFVNNVEVHTAQTQTHREDYNS |
| | | TLRVVSALPIQHQDWMSGKEFKCKVNNKDLPAPIERTISKPKGSVRAPQVY |
| | | VLPPPEEEMTKKQVTLTCMVTDFMPEDIYVEWTNNGKTELNYKNTEPVLDS |
| | | DGSYFMYSKLRVEKKNWVERNSYSCSVVHEGLHNHHTTKSFSRTPGK |
| FIT-Ig | SEQ ID NO: 552 | EVQLVESGGGLVQPGRSLKLSCAASGFTFSDFYMAWVRQAPKKGLEWVASI |
| Construct #2 | | SYEGSSTYYGDSVMGRFTISRDNAKSTLYLQMNSLRSEDTATYYCARQREA |
| | | NWEDWGQGVMVTVSSASTKGPSVFPLAPSSKSTSGGTAALGCLVKDYFPEP |
| | | VTVSWNSGALTSGVHTFPAVLQSSGLYSLSSVVTVPSSSLGTQTYICNVNH |
| | | KPSNTKVDKKV |
| FIT-Ig | SEQ ID NO: 553 | DIVMTQSPSSLAVSPGEKVTMTCKSSQSLYYSGVKENLLAWYQQKPGQSPK |
| Construct #3 | | LLIYYASIRFTGVPDRFTGSGSGTDYTLTITSVQAEDMGQYFCQQGINNPL |
| | | TFGDGTKLEIKRTVAAPSVFIFPPSDEQLKSGTASVVCLLNNFYPREAKVQ |
| | | WKVDNALQSGNSQESVTEQDSKDSTYSLSSTLTLSKADYEKHKVYACEVTH |
| | | QGLSSPVTKSFNRGEC |

hIgG1 FIT-Ig bispecific 3b

| | | |
|---|---|---|
| Antibody A | anti-PD-L1 | |
| | 1D05 | |
| Antibody B | anti-ICOS | |
| | STIM003 | |
| FIT-Ig | SEQ ID NO: 554 | DIVMTQSPSSLAVSPGEKVTMTCKSSQSLYYSGVKENLLAWYQQKPGQSPK |
| Construct #1 | | LLIYYASIRFTGVPDRFTGSGSGTDYTLTITSVQAEDMGQYFCQQGINNPL |
| | | TFGDGTKLEIKRTVAAPSVFIFPPSDEQLKSGTASVVCLLNNFYPREAKVQ |
| | | WKVDNALQSGNSQESVTEQDSKDSTYSLSSTLTLSKADYEKHKVYACEVTH |
| | | QGLSSPVTKSFNRGECEVQLVESGGGLVQPGRSLKLSCAASGFTFSDFYMA |
| | | WVRQAPKKGLEWVASISYEGSSTYYGDSVMGRFTISRDNAKSTLYLQMNSL |
| | | RSEDTATYYCARQREANWEDWGQGVMVTVSSASTKGPSVFPLAPSSKSTSG |
| | | GTAALGCLVKDYFPEPVTVSWNSGALTSGVHTFPAVLQSSGLYSLSSVVTV |
| | | PSSSLGTQTYICNVNHKPSNTKVDKKVEPKSCDKTHTCPPNLLGGPSVFIF |
| | | PPKIKDVLMISLSPIVTCVVVDVSEDDPDVQISWFVNNVEVHTAQTQTHRE |
| | | DYNSTLRVVSALPIQHQDWMSGKEFKCKVNNKDLPAPIERTISKPKGSVRA |
| | | PQVYVLPPPEEEMTKKQVTLTCMVTDFMPEDIYVEWTNNGKTELNYKNTEP |
| | | VLDSDGSYFMYSKLRVEKKNWVERNSYSCSVVHEGLHNHHTTKSFSRTPGK |
| FIT-Ig | SEQ ID NO: 555 | EVQLVESGGGLTQPGKSLKLSCEASGFTFSSFTMHWVRQSPGKGLEWVAFI |
| Construct #2 | | RSGSGIVFYADAVRGRFTISRDNAKNLLFLQMNDLKSEDTAMYYCARRPLG |
| | | HNTFDSWGQGTLVTVSSASTKGPSVFPLAPSSKSTSGGTAALGCLVKDYFP |
| | | EPVTVSWNSGALTSGVHTFPAVLQSSGLYSLSSVVTVPSSSLGTQTYICNV |
| | | NHKPSNTKVDKKV |
| FIT-Ig | SEQ ID NO: 556 | DIQMTQSPASLSASLGETVTIQCRASEDIYSGLAWFQQKPGKSPQLLIYGA |
| Construct #3 | | SSLQDGVPSRFSGSGSGTQYSLKISSMQTEDEGVYFCQQGLKYPPTFGSGT |
| | | KLEIKRTVAAPSVFIFPPSDEQLKSGTASVVCLLNNFYPREAKVQWKVDNA |
| | | LQSGNSQESVTEQDSKDSTYSLSSTLTLSKADYEKHKVYACEVTHQGLSSP |
| | | VTKSFNRGEC |

hIgG1 FIT-Ig bispecific 4a

| | | |
|---|---|---|
| Antibody A | anti-ICOS | |
| | STIM001 | |
| Antibody B | anti-PD-L1 | |
| | 84G09 | |
| FIT-Ig | SEQ ID NO: 557 | DIQMTQSPASLSASLGETVTIQCRASEDIYSGLAWFQQKPGKSPQLLIYGA |
| Construct #1 | | SSLQDGVPSRFSGSGSGTQYSLKISSMQTEDEGVYFCQQGLKYPPTFGSGT |
| | | KLEIKRTVAAPSVFIFPPSDEQLKSGTASVVCLLNNFYPREAKVQWKVDNA |
| | | LQSGNSQESVTEQDSKDSTYSLSSTLTLSKADYEKHKVYACEVTHQGLSSP |
| | | VTKSFNRGECEVQLVESGGGLTQPGKSLKLSCEASGFTFSSFTMHWVRQSP |
| | | GKGLEWVAFIRSGSGIVFYADAVRGRFTISRDNAKNLLFLQMNDLKSEDTA |
| | | MYYCARRPLGHNTFDSWGQGTLVTVSSASTKGPSVFPLAPSSKSTSGGTAA |
| | | LGCLVKDYFPEPVTVSWNSGALTSGVHTFPAVLQSSGLYSLSSVVTVPSSS |
| | | LGTQTYICNVNHKPSNTKVDKKVEPKSCDKTHTCPPNLLGGPSVFIFPPKI |
| | | KDVLMISLSPIVTCVVVDVSEDDPDVQISWFVNNVEVHTAQTQTHREDYNS |
| | | TLRVVSALPIQHQDWMSGKEFKCKVNNKDLPAPIERTISKPKGSVRAPQVY |
| | | VLPPPEEEMTKKQVTLTCMVTDFMPEDIYVEWTNNGKTELNYKNTEPVLDS |
| | | DGSYFMYSKLRVEKKNWVERNSYSCSVVHEGLHNHHTTKSFSRTPGK |
| FIT-Ig | SEQ ID NO: 558 | EVQLVESGGGLVQPGRSLKLSCAASGFTFSDFYMAWVRQAPKKGLEWVASI |
| Construct #2 | | SYEGSSTYYGDSVMGRFTISRDNAKSTLYLQMNSLRSEDTATYYCARQREA |
| | | NWEDWGQGVMVTVSSASTKGPSVFPLAPSSKSTSGGTAALGCLVKDYFPEP |
| | | VTVSWNSGALTSGVHTFPAVLQSSGLYSLSSVVTVPSSSLGTQTYICNVNH |
| | | KPSNTKVDKKV |
| FIT-Ig | SEQ ID NO: 559 | DIVMTQSPSSLAVSPGEKVTMTCKSSQSLYYSGVKENLLAWYQQKPGQSPK |
| Construct #3 | | LLIYYASIRFTGVPDRFTGSGSGTDYTLTITSVQAEDMGQYFCQQGINNPL |
| | | TFGDGTKLEIKRTVAAPSVFIFPPSDEQLKSGTASVVCLLNNFYPREAKVQ |
| | | WKVDNALQSGNSQESVTEQDSKDSTYSLSSTLTLSKADYEKHKVYACEVTH |
| | | QGLSSPVTKSFNRGEC |

hIgG1 FIT-Ig bispecific 4b

| | | |
|---|---|---|
| Antibody A | anti-PD-L1 | |
| | 84G09 | |
| Antibody B | anti-ICOS | |
| | STIM001 | |
| FIT-Ig | SEQ ID NO: 560 | DIVMTQSPSSLAVSPGEKVTMTCKSSQSLYYSGVKENLLAWYQQKPGQSPK |
| Construct #1 | | LLIYYASIRFTGVPDRFTGSGSGTDYTLTITSVQAEDMGQYFCQQGINNPL |
| | | TFGDGTKLEIKRTVAAPSVFIFPPSDEQLKSGTASVVCLLNNFYPREAKVQ |
| | | WKVDNALQSGNSQESVTEQDSKDSTYSLSSTLTLSKADYEKHKVYACEVTH |
| | | QGLSSPVTKSFNRGECEVQLVESGGGLVQPGRSLKLSCAASGFTFSDFYMA |
| | | WVRQAPKKGLEWVASISYEGSSTYYGDSVMGRFTISRDNAKSTLYLQMNSL |
| | | RSEDTATYYCARQREANWEDWGQGVMVTVSSASTKGPSVFPLAPSSKSTSG |
| | | GTAALGCLVKDYFPEPVTVSWNSGALTSGVHTFPAVLQSSGLYSLSSVVTV |
| | | PSSSLGTQTYICNVNHKPSNTKVDKKVEPKSCDKTHTCPPNLLGGPSVFIF |
| | | PPKIKDVLMISLSPIVTCVVVDVSEDDPDVQISWFVNNVEVHTAQTQTHRE |
| | | DYNSTLRVVSALPIQHQDWMSGKEFKCKVNNKDLPAPIERTISKPKGSVRA |
| | | PQVYVLPPPEEEMTKKQVTLTCMVTDFMPEDIYVEWTNNGKTELNYKNTEP |
| | | VLDSDGSYFMYSKLRVEKKNWVERNSYSCSVVHEGLHNHHTTKSFSRTPGK |
| FIT-Ig | SEQ ID NO: 561 | EVQLVESGGGLTQPGKSLKLSCEASGFTFSSFTMHWVRQSPGKGLEWVAFI |
| Construct #2 | | RSGSGIVFYADAVRGRFTISRDNAKNLLFLQMNDLKSEDTAMYYCARRPLG |
| | | HNTFDSWGQGTLVTVSSASTKGPSVFPLAPSSKSTSGGTAALGCLVKDYFP |
| | | EPVTVSWNSGALTSGVHTFPAVLQSSGLYSLSSVVTVPSSSLGTQTYICNV |
| | | NHKPSNTKVDKKV |
| FIT-Ig | SEQ ID NO: 562 | DIQMTQSPASLSASLGETVTIQCRASEDIYSGLAWFQQKPGKSPQLLIYGA |
| Construct #3 | | SSLQDGVPSRFSGSGSGTQYSLKISSMQTEDEGVYFCQQGLKYPPTFGSGT |
| | | KLEIKRTVAAPSVFIFPPSDEQLKSGTASVVCLLNNFYPREAKVQWKVDNA |
| | | LQSGNSQESVTEQDSKDSTYSLSSTLTLSKADYEKHKVYACEVTHQGLSSP |
| | | VTKSFNRGEC |

Sequences of antibody heavy chain variable regions obtained from additional clones
CDRs are defined according to IMGT.

| CLONE_ID | VH_NUCLEOTIDE_SEQUENCE | VH_AMINO_ACID_SEQ | HCDR1 | HCDR2 | HCDR3 |
|---|---|---|---|---|---|
| CL-61091 | CAGGTTCAACTGATGCAGTCTGGAACTGAGGTGAAGAAG | QVQLMQSGTEVKKPGAS | GYTFTTY | ISAYSGD | ARSSGWP |
| | CCTGGGGCCTCAGTGAAGGTCTCCTGCAAGACTTCTGGT | VKVSCKTSGYTFTTYGI | G | T | HHYGMDV |
| | TACACCTTTACCACCTATGGTATCACTTGGGTGCGACAG | TWVRQAPGQGLEWMGWI | SEQ ID | SEQ ID | SEQ ID |
| | GCCCCTGGACAAGGGCTTGAGTGGATGGGATGGATCAGC | SAYSGDTDYAQKFQGRV | NO: 565 | NO: 566 | NO: 567 |
| | GCTTACAGTGGTGACACAGACTATGCACAGAAGTTCCAG | TVTTDTSTNTAYMELRS | | | |
| | GGCAGAGTCACCGTGACAACAGACACATCCACGAACACA | LKSDDTAVYYCARSSGW | | | |
| | GCCTACATGGAGTTGAGGAGCCTGAAATCTGACGACACG | PHHYGMDVWGQGTTVTV | | | |
| | GCCGTGTATTATTGTGCGAGAAGTAGTGGCTGGCCCCAC | SS | | | |
| | CACTACGGTATGGACGTCTGGGGCCAAGGGACCACGGTC | SEQ ID NO: 564 | | | |
| | ACCGTCTCCTCAG | | | | |
| | SEQ ID NO: 563 | | | | |
| CL-64536 | CAGGTTCAACTGGTGCAGTCTGGAGGTGAGGTGAAAAAG | QVQLVQSGGEVKKPGAS | GYTFTSY | ISAYNGN | ARSTSYY |
| | CCTGGGGCCTCAGTGAAGGTCTCCTGCAAGGCTTCTGGT | VKVSCKASGYTFTSYGF | G | T | GSGTLYG |
| | TACACCTTTACCAGCTATGGTTTCAGCTGGGTGCGACAG | SWVRQAPGQGLEWMGWI | SEQ ID | SEQ ID | MDV |
| | GCCCCTGGACAAGGACTAGAGTGGATGGGATGGATCAGC | SAYNGNTNYAQKLQGRV | NO: 377 | NO: 378 | SEQ ID |
| | GCTTACAATGGTAACACAAACTATGCACAGAAGCTCCAG | SMTTDTSTSTAYMELRS | | | NO: 570 |
| | GGCAGAGTCTCCATGACCACAGACACATCCACGAGCACA | LRSDDTAVYFCARSTSY | | | |
| | GCCTACATGGAGCTGAGGAGCTTGAGATCTGACGACACG | YGSGTLYGMDVWGQGTT | | | |
| | GCCGTGTATTTCTGTGCGCGATCTACGTCTTACTATGGT | VTVSS | | | |
| | TCGGGGACCCTATACGGTATGGACGTCTGGGGCCAAGGG | SEQ ID NO: 569 | | | |
| | ACCACGGTCACCGTCTCCTCAG | | | | |
| | SEQ ID NO: 568 | | | | |
| CL-64837 | CAGGTTCAACTGGTGCAGTCTGGAGGTGAGGTGAAGAAG | QVQLVQSGGEVKKPGAS | GYTFTSY | ISAYNGN | ARSTSYY |
| | CCTGGGGCCTCAGTGAAGGTCTCCTGCAAGGCTTCTGGT | VKVSCKASGYTFTSYGF | G | T | GSGTLYG |
| | TACACCTTTACCAGCTATGGTTTCAGCTGGGTGCGACAG | SWVRQAPGQGLEWMGWI | SEQ ID | SEQ ID | MDV |
| | GCCCCTGGACAAGGACTAGAGTGGATGGGATGGATCAGC | SAYNGNTNYAQKLQGRV | NO: 377 | NO: 378 | SEQ ID |
| | GCTTACAATGGTAACACAAACTATGCACAGAAGCTCCAG | SMTTDTSTSTAYMELRS | | | NO: 570 |
| | GGCAGAGTCTCCATGACCACAGACACATCCACGAGCACA | LRSDDTAVYYCARSTSY | | | |
| | GCCTACATGGAGCTGAGGAGCTTGAGATCTGACGACACG | YGSGTLYGMDVWGQGTT | | | |
| | GCCGTGTATTACTGTGCGCGATCTACGTCTTACTATGGT | VTVSS | | | |
| | TCGGGGACCCTCTACGGTATGGACGTCTGGGGCCAAGGG | SEQ ID NO: 572 | | | |
| | ACCACGGTCACCGTCTCCTCAG | | | | |
| | SEQ ID NO: 571 | | | | |
| CL-64841 | CAGGTTCAACTGGTGCAGTCTGGAGGTGAGGTGAAAAAG | QVQLVQSGGEVKKPGAS | GYTFTSY | ISAYNGN | ARSTSYY |
| | CCTGGGGCCTCAGTGAAGGTCTCCTGCAAGGCTTCTGGT | VKVSCKASGYTFTSYGF | G | T | GSGTLYG |
| | TACACCTTTACCAGCTATGGTTTCAGCTGGGTGCGACAG | SWVRQAPGQGLEWMGWI | SEQ ID | SEQ ID | MDV |
| | GCCCCTGGACAAGGACTAGAGTGGATGGGATGGATCAGC | SAYNGNTNYAQKLQGRV | NO: 377 | NO: 378 | SEQ ID |
| | GCTTACAATGGTAACACAAACTATGCACAGAAGCTCCAG | SMTTDTSTSTAYMELRS | | | NO: 570 |
| | GGCAGAGTCTCCATGACCACAGACACATCCACGAGCACA | LRSDDTAVYFCARSTSY | | | |
| | GCCTACATGGAGCTGAGGAGCTTGAGATCTGACGACACG | YGSGTLYGMDVWGQGTT | | | |
| | GCCGTGTATTTCTGTGCGCGATCTACGTCTTACTATGGT | VTVSS | | | |
| | TCGGGGACCCTATACGGTATGGACGTCTGGGGCCAAGGG | SEQ ID NO: 574 | | | |
| | ACCACGGTCACCGTCTCCTCAG | | | | |
| | SEQ ID NO: 573 | | | | |
| CL-64912 | CAGGTTCAACTGGTGCAGTCTGGAGGTGAGGTGAAAAAG | QVQLVQSGGEVKKPRAS | GYTFTSY | ISGYNGN | ARSTSYY |
| | CCTCGGGCCTCAGTGAAGGTCTCCTGCAAGGCTTCTGGT | VKVSCKASGYTFTSYVF | V | T | GAGTLYG |
| | TACACCTTTACCAGCTATGTGTTCAGCTGGGTGCGACAT | SWVRHAAGQGLEWMGWI | SEQ ID | SEQ ID | MDV |
| | GCCGCTGGACAAGGACTAGAGTGGATGGGATGGATCAGC | SGYNGNTNYAQKLQCGV | NO: 577 | NO: 578 | SEQ ID |
| | GGTTACAATGGTAACACAAACTATGCACAGAAGCTCCAG | SMTADTSTSTAYMELRS | | | NO: 579 |
| | TGCGGAGTCTCGATGACCGCAGACACATCCACGAGCACA | LRSDDTAVYFCARSTSY | | | |
| | GCCTACATGGAGCTGAGGAGCTTGAGATCTGACGACACG | YGAGTLYGMDVWGQGTT | | | |
| | GCCGTGTATTTCTGTGCGCGATCTACGTCTTACTATGGT | VTVSS | | | |
| | GCGGGGACCCTATACGGTATGGACGTCTGGGGCCAAGGG | SEQ ID NO: 576 | | | |
| | ACCACGGTCACCGTCTCCTCAG | | | | |
| | SEQ ID NO: 575 | | | | |
| CL-71642 | GAGGTGCAGCTGGTGGAGTCTGGGGGAGGTGTGGTACGG | EVQLVESGGGVVRPGGS | GFTFDDY | INWNGGS | AADYYGS |
| | CCTGGGGGGTCCCTGAGACTCTCCTGTGCAGCCTCTGGA | LRLSCAASGFTFDDYGM | G | T | GSYYNVP |
| | TTCACCTTTGATGATTATGGCATGAGCTGGGTCCGCCAA | SWVRQAPGKGLEWVSGI | SEQ ID | SEQ ID | FDY |
| | GCTCCAGGGAAGGGGCTGGAGTGGGTCTCTGGTATTAAT | NWNGGSTGYADSVKGRF | NO: 582 | NO: 583 | SEQ ID |
| | TGGAATGGTGGTAGCACAGGTTATGCAGACTCTGTGAAG | TISRDNAKNSLYLQMNS | | | NO: 584 |
| | GGCCGATTCACCATCTCCAGAGACAACGCCAAGAACTCC | LRAEDTALYYCAADYYG | | | |
| | CTGTATCTGCAAATGAACAGTCTGAGAGCCGAGGACACG | SGSYYNVPFDYWGQGTL | | | |
| | GCCTTGTATTACTGTGCGGCCGATTACTATGGTTCGGGG | VTVSS | | | |
| | AGTTATTATAACGTCCCCTTTGACTACTGGGGCCAGGGA | SEQ ID NO: 581 | | | |
| | ACCCTGGTCACCGTCTCCTCAG | | | | |
| | SEQ ID NO: 580 | | | | |
| CL-74570 | GAGGTGCAGCTGGTGGAGTCTGGGGGAGGTGTGATACGG | EVQLVESGGGVIRPGGS | GFTFDDY | INWIGDN | ARDYFGS |
| | CCTGGGGGGTCCCTGAGACTCTCCTGTGCAGCCTCTGGA | LRLSCAASGFTFDDYGM | G | T | GSYYNVP |
| | TTCACCTTTGATGATTATGGCATGAGCTGGGTCCGCCAA | SWVRQAPGKGLEWVSGI | SEQ ID | SEQ ID | FDY |
| | GCTCCAGGGAAGGGGCTGGAGTGGGTCTCTGGTATTAAT | NWIGDNTDYADSVKGRF | NO: 582 | NO: 587 | SEQ ID |
| | TGGATTGGTGATAACACAGATTATGCAGACTCTGTGAAG | TISRDNAKNSLYLQMNS | | | NO: 588 |
| | GGCCGATTCACCATCTCCAGAGACAACGCCAAGAACTCC | LRAEDTALYYCARDYFG | | | |
| | CTATATCTGCAAATGAACAGTCTGAGAGCCGAGGACACG | SGSYYNVPFDYWGQGTL | | | |
| | GCCTTGTATTACTGTGCGAGAGATTACTTTGGTTCGGGG | VTVSS | | | |
| | AGTTATTATAACGTTCCCTTTGACTACTGGGGCCAGGGA | SEQ ID NO: 586 | | | |
| | ACCCTGGTCACCGTCTCCTCAG | | | | |
| | SEQ ID NO: 585 | | | | |

TABLE S5
Sequences of antibody light chain variable regions obtained from additional clones
N terminal E and 5′ nucleotide additions in CL-71642 are shown in bold. These were
not recovered in sequencing but were determined to be
present in the sequence by comparison against the related clones as shown
in FIG. 6. CDRs are defined according to IMGT.

| CLONE_ID | VL NUCLEOTIDE SEQUENCE | VL_AMINO_ACID_SEQ | LCDR1 | LCDR2 | LCDR3 |
|---|---|---|---|---|---|
| CL-61091 | GATATTGTGATGACTCAGTCTCCACTCTCCCT | DIVMTQSPLSLPVTPGE | QSLLHSN | LVS | MQALQTP |
| | GCCCGTCACCCCTGGAGAGCCGGCCTCCATCT | PASISCRSSQSLLHSNG | GFNY | SEQ ID | LT |
| | CCTGCAGGTCTAGTCAGAGCCTCCTGCATAGT | FNYFDWYLQKPGQSPQL | SEQ ID | NO: 592 | SEQ ID |
| | AATGGATTCAACTATTTCGATTGGTACCTGCA | LIFLVSNRASGVPDRFS | NO: 591 | | NO: 593 |
| | GAAGCCAGGACAGTCTCCACAGCTCCTGATCT | GSGSGTDFTLKISRVEA | | | |
| | TTTTGGTTTCTAATCGGGCCTCCGGGGTCCCT | EDVGIYYCMQALQTPLT | | | |
| | GACAGGTTCAGTGGCAGTGGATCAGGCACAGA | FGGGTKVEIK | | | |
| | TTTTACACTGAAAATCAGCAGAGTGGAGGCTG | SEQ ID NO: 590 | | | |
| | AGGATGTTGGGATTTATTACTGCATGCAAGCT | | | | |
| | CTACAAACTCCGCTCACTTTCGGCGGAGGGAC | | | | |
| | CAAGGTGGAGATCAAAC | | | | |
| | SEQ ID NO: 589 | | | | |
| CL-64536 | GATATTGTGATGACTCAGTCTCCACTCTCCCT | DIVMTQSPLSLPVTPGE | QSLLHSN | LGS | MQALQTP |
| | GCCCGTCACCCCTGGAGAGCCGGCCTCCATCT | PASISCRSSQSLLHSNG | GYNC | SEQ ID | CS |
| | CCTGCAGGTCTAGTCAGAGCCTCCTGCATAGT | YNCLDWYLQKPGQSPQL | SEQ ID | NO: 371 | SEQ ID |
| | AATGGATACAACTGTTTGGATTGGTACCTGCA | LIYLGSTRASGFPDRFS | NO: 596 | | NO: 400 |
| | GAAGCCAGGGCAGTCTCCACAGCTCCTGATCT | GSGSGTDFTLKISRVEA | | | |
| | ATTTGGGTTCTACTCGGGCCTCCGGGTTCCCT | EDVGVYYCMQALQTPCS | | | |
| | GACAGGTTCAGTGGCAGTGGATCAGGCACAGA | FGQGTKLEIK | | | |
| | TTTTACACTGAAAATCAGCAGAGTGGAGGCTG | SEQ ID NO: 595 | | | |
| | AGGATGTTGGGGTTTATTACTGCATGCAAGCT | | | | |
| | CTACAAACTCCGTGCAGTTTTGGCCAGGGGAC | | | | |
| | CAAGCTGGAGATCAAAC | | | | |
| | SEQ ID NO: 594 | | | | |
| CL-64837 | GATATTGTGATGACTCAGTCTCCACTCTCCCT | DIVMTQSPLSLPVTPGE | QSLLHSN | LGS | MQALQTP |
| | GCCCGTCACCCCTGGAGAGCCGGCCTCCATCT | PASISCRSSQSLLHSNG | GYNC | SEQ ID | CS |
| | CCTGCAGGTCTAGTCAGAGCCTCCTGCATAGT | YNCLDWYLQKPGQSPQL | SEQ ID | NO: 371 | SEQ ID |
| | AATGGATACAACTGTTTGGATTGGTACCTGCA | LIYLGSTRASGFPDRFS | NO: 596 | | NO: 400 |
| | GAAGCCAGGGCAGTCTCCACAGCTCCTGATCT | GSGSGTDFTLKISRVEA | | | |
| | ATTTGGGTTCTACTCGGGCCTCCGGGTTCCCT | EDVGVYYCMQALQTPCS | | | |
| | GACAGGTTCAGTGGCAGTGGATCAGGCACAGA | FGQGTKLEIK | | | |
| | TTTTACACTGAAAATCAGCAGAGTGGAGGCTG | SEQ ID NO: 598 | | | |
| | AGGATGTTGGGGTTTATTACTGCATGCAAGCT | | | | |
| | CTACAAACTCCGTGCAGTTTTGGCCAGGGGAC | | | | |
| | CAAGCTGGAGATCAAAC | | | | |
| | SEQ ID NO: 597 | | | | |
| CL-64841 | GATATTGTGATGACTCAGTCTCCACTCTCCCT | DIVMTQSPLSLPVTPGE | QSLLHSN | LGS | MQALQTP |
| | GCCCGTCACCCCTGGAGAGCCGGCCTCCATCT | PASISCRSSQSLLHSNG | GYNC | SEQ ID | CS |
| | CCTGCAGGTCTAGTCAGAGCCTCCTGCATAGT | YNCLDWYLQKPGQSPQL | SEQ ID | NO: 371 | SEQ ID |
| | AATGGATACAACTGTTTGGATTGGTACCTGCA | LIYLGSTRASGFPDRFS | NO: 596 | | NO: 400 |
| | GAAGCCAGGGCAGTCTCCACAGCTCCTGATCT | GSGSGTDSTLKISRVEA | | | |
| | ATTTGGGTTCTACTCGGGCCTCCGGGTTCCCT | EDVGVYYCMQALQTPCS | | | |
| | GACAGGTTCAGTGGCAGTGGATCAGGCACAGA | FGQGTKLEIK | | | |
| | TTCTACACTGAAAATCAGCAGAGTGGAGGCTG | SEQ ID NO: 600 | | | |
| | AGGATGTTGGGGTTTATTACTGCATGCAAGCT | | | | |
| | CTACAAACTCCGTGCAGTTTTGGCCAGGGGAC | | | | |
| | CAAGCTGGAGATCAAAC | | | | |
| | SEQ ID NO: 599 | | | | |
| CL-64912 | GATATTGTGATGACTCAGTCTCCACTCTCCCT | DIVMTQSPLSLPVTPGE | QSLLHSN | LGS | MQALQTP |
| | GCCCGTCACCCCTGGAGAGCCGGCCTCCATCT | PASISCRSSQSLLHSNG | GYNC | SEQ ID | CS |
| | CCTGCAGGTCTAGTCAGAGCCTCCTGCATAGT | YNCLDWYLQKPGQSPQL | SEQ ID | NO: 371 | SEQ ID |
| | AATGGATACAACTGTTTGGATTGGTACCTGCA | LIYLGSTRASGFPDRFS | NO: 596 | | NO: 400 |
| | GAAGCCAGGGCAGTCTCCACAGCTCCTGATCT | GSGSGTDFTLKISRVEA | | | |
| | ATTTGGGTTCTACTCGGGCCTCCGGGTTCCCT | EDVGVYYCMQALQTPCS | | | |
| | GACAGGTTCAGTGGCAGTGGATCAGGCACAGA | FGQGTKLEIK | | | |
| | TTTTACACTGAAAATCAGCAGAGTGGAGGCTG | SEQ ID NO: 602 | | | |
| | AGGATGTTGGGGTTTATTACTGCATGCAAGCT | | | | |
| | CTACAAACTCCGTGCAGTTTTGGCCAGGGGAC | | | | |
| | CAAGCTGGAGATCAAAC | | | | |
| | SEQ ID NO: 601 | | | | |
| CL-71642 | GAAATTGTGTTGACGCAGTCTCCAGGCACCCT | EIVLTQSPGTLSLSPGE | QSVSSSY | GAS | QQYGSSP |
| | GTCTTTGTCTCCAGGGGAAAGAGCCACCCTCT | RATLSCRASQSVSSSYL | SEQ ID | SEQ ID | FT |
| | CCTGCAGGGCCAGTCAGAGTGTTAGCAGCAGC | AWYQQKPGQAPRLLIYG | NO: 426 | NO: 413 | SEQ ID |
| | TACTTAGCCTGGTACCAGCAGAAACCTGGCCA | ASSRATGIPDRFSGSGS | | | NO: 605 |
| | GGCTCCCAGGCTCCTCATCTATGGTGCATCCA | GTDFTLTISRLEPEDFA | | | |
| | GCAGGGCCACTGGCATCCCAGACAGGTTCAGT | VYYCQQYGSSPFTFGPG | | | |
| | GGCAGTGGGTCTGGGACAGACTTCACTCTCAC | TKVDIK | | | |
| | CATCAGCAGACTGGAGCCTGAAGATTTTGCAG | SEQ ID NO: 604 | | | |
| | TGTATTACTGTCAGCAGTATGGTAGCTCACCT | | | | |
| | TTCACTTTCGGCCCTGGGACCAAAGTGGATAT | | | | |
| | CAAAC | | | | |
| | SEQ ID NO: 603 | | | | |
| CL-74570 | GAAATTGTGTTGACGCAGTCTCCAGGCACCCT | EIVLTQSPGTLSLSPGE | QSVSSSY | GAS | HQYGNSP |
| | GTCTTTGTCTCCAGGGGAAAGAGCCACCCTCT | RATLSCRASQSVSSSYL | SEQ ID | SEQ ID | FT |
| | CCTGCAGGGCCAGTCAGAGTGTTAGCAGCAGC | AWYQQKPGQAPRLLIYG | NO: 426 | NO: 413 | SEQ ID |
| | TACTTAGCCTGGTACCAGCAGAAACCTGGCCA | ASSRATGIPDRFSGSGS | | | NO: 608 |
| | GGCTCCCAGGCTCCTCATCTATGGTGCATCCA | GTDFTLTISRLEPEDFA | | | |
| | GCAGGGCCACTGGCATCCCAGACAGGTTCAGT | VYYCHQYGNSPFTFGPG | | | |
| | GGCAGTGGGTCTGGGACAGACTTCACTCTCAC | TKVDIK | | | |
| | CATCAGCAGACTGGAACCTGAAGATTTTGCAG | SEQ ID NO: 607 | | | |
| | TATATTACTGTCACCAGTATGGTAATTCACCA | | | | |
| | TTCACTTTCGGCCCTGGGACCAAAGTGGATAT | | | | |
| | CAAAC | | | | |
| | SEQ ID NO: 606 | | | | |

The application's sequence listing, which the Patent Office published only in electronic form, follows.

SEQUENCE LISTING (620 sequences)

SEQ ID NO: 1 - protein, 290 aa, Homo Sapiens
MRIFAVFIFMTYWHLLNAFTVTVPKDLYVVEYGSNMTIECKFPVEKQLDLAALIVYWEMEDKNIIQFVHGEEDLKVQHSSYRQRARLLKDQLSLGNAALQITDVKLQDAGVYRCMISYGGADYKRITVKVNAPYNKINQRILVVDPVTSEHELTCQAEGYPKAEVIWTSSDHQVLSGKTTTTNSKREEKLFNVTSTLRINTTTNEIFYCTFRRLDPEENHTAELVIPELPLAHPPNERTHLVILGAILLCLGVALTFIFRLRKGRMMDVKKCGIQDTNSKKQSDTHLEET

SEQ ID NO: 2 - protein, 241 aa, Cynomologus
MGWSCIILFLVATATGVHSMFTVTVPKDLYVVEYGSNMTIECKFPVEKQLDLTSLIVYWEMEDKNIIQFVHGEEDLKVQHSNYRQRAQLLKDQLSLGNAALRITDVKLQDAGVYRCMISYGGADYKRITVKVNAPYNKINQRILVVDPVTSEHELTCQAEGYPKAEVIWTSSDHQVLSGKTTTTNSKREEKLLNVTSTLRINTTANEIFYCIFRRLDPEENHTAELVIPELPLALPPNERT

SEQ ID NO: 3 - protein, 245 aa, Homo Sapiens
MRIFAVFIFMTYWHLLNAFTVTVPKDLYVVEYGSNMTIECKFPVEKQLDLAALIVYWEMEDKNIIQFVHGEEDLKVQHSSYRQRARLLKDQLSLGNAALQITDVKLQDAGVYRCMISYGGADYKRITVKVNAPYNKINQRILVVDPVTSEHELTCQAEGYPKAEVIWTSSDHQVLSGKTTTTNSKREEKLFNVTSTLRINTTTNEIFYCTFRRLDPEENHTAELVIPELPLAHPPNERTHHHHHH

SEQ ID NO: 4 - protein, 475 aa, Homo Sapiens
MRIFAVFIFMTYWHLLNAFTVTVPKDLYVVEYGSNMTIECKFPVEKQLDLAALIVYWEMEDKNIIQFVHGEEDLKVQHSSYRQRARLLKDQLSLGNAALQITDVKLQDAGVYRCMISYGGADYKRITVKVNAPYNKINQRILVVDPVTSEHELTCQAEGYPKAEVIWTSSDHQVLSGKTTTTNSKREEKLFNVTSTLRINTTTNEIFYCTFRRLDPEENHTAELVIPELPLAHPPNERTIEGREPKSCDKTHTCPPCPAPELLGGPSVFLFPPKPKDTLMISRTPEVTCVVVDVSHEDPEVKFNWYVDGVEVHNAKTKPREEQYNSTYRVVSVLTVLHQDWLNGKEYKCKVSNKALPAPIEKTISKAKGQPREPQVYTLPPSRDELTKNQVSLTCLVKGFYPSDIAVEWESNGQPENNYKTTPPVLDSDGSFFLYSKLTVDKSRWQQGNVFSCSVMHEALHNHYTQKSLSLSPGK

SEQ ID NO: 5 - protein, 249 aa, Cynomologus
MGWSCIILFLVATATGVHSMFTVTVPKDLYVVEYGSNMTIECKFPVEKQLDLTSLIVYWEMEDKNIIQFVHGEEDLKVQHSNYRQRAQLLKDQLSLGNAALRITDVKLQDAGVYRCMISYGGADYKRITVKVNAPYNKINQRILVVDPVTSEHELTCQAEGYPKAEVIWTSSDHQVLSGKTTTTNSKREEKLLNVTSTLRINTTANEIFYCIFRRLDPEENHTAELVIPELPLALPPNERTDYKDDDDK

SEQ ID NO: 6 - protein, 405 aa, Homo Sapiens
MGWSCIILFLVATATGVHSLDSPDRPWNPPTFSPALLVVTEGDNATFTCSFSNTSESFVLNWYRMSPSNQTDKLAAFPEDRSQPGQDCRFRVTQLPNGRDFHMSVVRARRNDSGTYLCGAISLAPKAQIKESLRAELRVTERRAEVPTAHPSPSPRPAGQKLENLYFQGIEGRMDEPKSCDKTHTCPPCPAPELLGGPSVFLFPPKPKDTLMISRTPEVTCVVVDVSHEDPEVKFNWYVDGVEVHNAKTKPREEQYNSTYRVVSVLTVLHQDWLNGKEYKCKVSNKALPAPIEKTISKAKGQPREPQVYTLPPSRDELTKNQVSLTCLVKGFYPSDIAVEWESNGQPENNYKTTPPVLDSDGSFFLYSKLTVDKSRWQQGNVFSCSVMHEALHNHYTQKSLSLSP

SEQ ID NO: 7 - protein, 8 aa, Homo Sapiens
GFTFDDYA

SEQ ID NO: 8 - protein, 8 aa, Homo Sapiens
ISWKSNII

SEQ ID NO: 9 - protein, 15 aa, Homo Sapiens
ARDITGSGSYGWFDP

SEQ ID NO: 10 - protein, 5 aa, Homo Sapiens
DYAMH

SEQ ID NO: 11 - protein, 17 aa, Homo Sapiens
GISWKSNIIGYADSVKG

SEQ ID NO: 12 - protein, 13 aa, Homo Sapiens
DITGSGSYGWFDP

SEQ ID NO: 13 - protein, 122 aa, Homo Sapiens
EVQLVESGGGLVQPGRSLRLSCAASGFTFDDYAMHWVRQTPGKGLEWVSGISWKSNIIGYADSVKGRFTISRDNAKNSLYLQMNSLRAEDTALYYCARDITGSGSYGWFDPWGQGTLVTVSS

SEQ ID NO: 14 - DNA, 508 bp, Homo Sapiens
caagaaaaagcttgccgccaccatggagtttgggctgagctggattttccttttggctattttaaaaggtgtccagtgtgaagtacaattggtggagtccgggggaggcttggtacagcctggcaggtccctgagactctcctgtgcagcctctggattcacctttgatgattatgccatgcactgggtccgacaaactccagggaagggcctggagtgggtctcaggtataagttggaagagtaatatcataggctatgcggactctgtgaagggccgattcaccatctccagagacaacgccaagaactccctgtatctgcaaatgaacagtctgagagctgaggacacggccttgtattattgtgcaagagatataacgggttcggggagttatggctggttcgacccctggggccagggaaccctggtcaccgtctcctcagccaaaacgacacccccatctgtctatccactggcccctgaatctgctaaaactcagcctccg

SEQ ID NO: 15 - protein, 449 aa, Homo Sapiens
EVQLVESGGGLVQPGRSLRLSCAASGFTFDDYAMHWVRQTPGKGLEWVSGISWKSNIIGYADSVKGRFTISRDNAKNSLYLQMNSLRAEDTALYYCARDITGSGSYGWFDPWGQGTLVTVSSASTKGPSVFPLAPCSRSTSESTAALGCLVKDYFPEPVTVSWNSGALTSGVHTFPAVLQSSGLYSLSSVVTVPSSSLGTKTYTCNVDHKPSNTKVDKRVESKYGPPCPPCPAPEFEGGPSVFLFPPKPKDTLMISRTPEVTCVVVDVSQEDPEVQFNWYVDGVEVHNAKTKPREEQFNSTYRVVSVLTVLHQDWLNGKEYKCKVSNKGLPSSIEKTISKAKGQPREPQVYTLPPSQEEMTKNQVSLTCLVKGFYPSDIAVEWESNGQPENNYKTTPPVLDSDGSFFLYSRLTVDKSRWQEGNVFSCSVMHEALHNHYTQKSLSLSLGK

SEQ ID NO: 16 - DNA, 1356 bp, Homo Sapiens
gaagtgcagctggtggaatctggcggcggactggtgcagcctggcagatccctgagactgtcttgtgccgcctccggcttcaccttcgacgactacgctatgcactgggtgcgacagacccctggcaagggcctggaatgggtgtccggcatctcctggaagtccaacatcatcggctacgccgactccgtgaagggccggttcaccatctcccgggacaacgccaagaactccctgtacctgcagatgaacagcctgcgggccgaggacaccgccctgtactactgcgccagagacatcaccggctccggctcctacggatggttcgatccttggggccagggcaccctcgtgaccgtgtcctctgccagcaccaagggcccctctgtgttccctctggccccttccagcaagtccacctctggcggaacagccgctctgggctgcctcgtgaaggactacttccccgagcctgtgaccgtgtcctggaactctggcgctctgaccagcggagtgcacaccttccctgctgtgctgcagtcctccggcctgtactccctgtcctccgtcgtgaccgtgccttccagctctctgggcacccagacctacatctgcaacgtgaaccacaagccctccaacaccaaggtggacaagaaggtggaacccaagtcctgcgacaagacccacacctgtcccccttgtcctgcccctgaactgctgggcggaccttccgtgttcctgttccccccaaagcccaaggacaccctgatgatctcccggacccccgaagtgacctgcgtggtggtggatgtgtcccacgaggaccctgaagtgaagttcaattggtacgtggacggcgtggaagtgcacaacgccaagaccaagcctagagaggaacagtacaactccacctaccgggtggtgtccgtgctgaccgtgctgcaccaggattggctgaacggcaaagagtacaagtgcaaggtgtccaacaaggccctgcctgcccccatcgaaaagaccatctccaaggccaagggccagccccgggaaccccaggtgtacacactgccccctagcagggacgagctgaccaagaaccaggtgtccctgacctgtctcgtgaaaggcttctacccctccgatatcgccgtggaatgggagtccaacggccagcctgagaacaactacaagaccaccccccctgtgctggactccgacggctcattcttcctgtacagcaagctgacagtggacaagtcccggtggcagcagggcaacgtgttctcctgctccgtgatgcacgaggccctgcacaaccactacacccagaagtccctgtccctgagccccggcaag

SEQ ID NO: 17 - protein, 6 aa, Homo Sapiens
QSISSY

SEQ ID NO: 18 - protein, 3 aa, Homo Sapiens
VAS

SEQ ID NO: 19 - protein, 9 aa, Homo Sapiens
QQSYSNPIT

SEQ ID NO: 20 - protein, 11 aa, Homo Sapiens
RASQSISSYLN

SEQ ID NO: 21 - protein, 7 aa, Homo Sapiens
VASSLQS

SEQ ID NO: 22 - protein, 9 aa, Homo Sapiens
QQSYSNPIT

SEQ ID NO: 23 - protein, 107 aa, Homo Sapiens
DIQMTQSPSSLSASVGDRVTITCRASQSISSYLNWYQQKPGKAPKPLIYVASSLQSGVPSSFSGSGSGTDFTLTISSLQPEDFATYYCQQSYSNPITFGQGTRLEIK

SEQ ID NO: 24 - DNA, 321 bp, Homo Sapiens
gacatccagatgacccagtctccatcctccctgtctgcatctgtaggagacagagtcaccatcacttgccgggcaagtcagagcattagcagctatttaaattggtatcagcagaaaccagggaaagcccctaagcccctgatctatgttgcatccagtttgcaaagtggggtcccatcaagtttcagtggcagtggatctgggacagatttcactctcaccatcagcagtctgcaacctgaagattttgcaacttactactgtcaacagagttacagtaatccgatcaccttcggccaagggacacgactggagatcaaa

SEQ ID NO: 25 - protein, 214 aa, Homo Sapiens
DIQMTQSPSSLSASVGDRVTITCRASQSISSYLNWYQQKPGKAPKPLIYVASSLQSGVPSSFSGSGSGTDFTLTISSLQPEDFATYYCQQSYSNPITFGQGTRLEIKRTVAAPSVFIFPPSDEQLKSGTASVVCLLNNFYPREAKVQWKVDNALQSGNSQESVTEQDSKDSTYSLSSTLTLSKADYEKHKVYACEVTHQGLSSPVTKSFNRGEC

SEQ ID NO: 26 - DNA, 642 bp, Homo Sapiens
gacatccagatgacccagtctccatcctccctgtctgcatctgtaggagacagagtcaccatcacttgccgggcaagtcagagcattagcagctatttaaattggtatcagcagaaaccagggaaagcccctaagcccctgatctatgttgcatccagtttgcaaagtggggtcccatcaagtttcagtggcagtggatctgggacagatttcactctcaccatcagcagtctgcaacctgaagattttgcaacttactactgtcaacagagttacagtaatccgatcaccttcggccaagggacacgactggagatcaaacgtacggtggccgctccctccgtgttcatcttcccaccttccgacgagcagctgaagtccggcaccgcttctgtcgtgtgcctgctgaacaacttctacccccgcgaggccaaggtgcagtggaaggtggacaacgccctgcagtccggcaactcccaggaatccgtgaccgagcaggactccaaggacagcacctactccctgtcctccaccctgaccctgtccaaggccgactacgagaagcacaaggtgtacgcctgcgaagtgacccaccagggcctgtctagccccgtgaccaagtctttcaaccggggcgagtgt

SEQ ID NO: 27 - protein, 8 aa, Homo Sapiens
GFTFDDYA

SEQ ID NO: 28 - protein, 8 aa, Homo Sapiens
ISWIRTGI

SEQ ID NO: 29 - protein, 16 aa, Homo Sapiens
AKDMKGSGTYGGWFDT

SEQ ID NO: 30 - protein, 5 aa, Homo Sapiens
DYAMH

SEQ ID NO: 31 - protein, 17 aa, Homo Sapiens
GISWIRTGIGYADSVKG

SEQ ID NO: 32 - protein, 14 aa, Homo Sapiens
DMKGSGTYGGWFDT

SEQ ID NO: 33 - protein, 123 aa, Homo Sapiens
EVQLVESGGGLVQPGRSLRLSCAASGFTFDDYAMHWVRQVPGKGLEWVSGISWIRTGIGYADSVKGRFTIFRDNAKNSLYLQMNSLRAEDTALYYCAKDMKGSGTYGGWFDTWGQGTLVTVSS

SEQ ID NO: 34 - DNA, 482 bp, Homo Sapiens
aagcttgccgccaccatggagtttgggctgagctggattttccttttggctattttaaaaggtgtccagtgtgaagtgcagctggtggagtctgggggaggcttggtgcagcctggcaggtccctgagactctcctgtgcagcctctggattcacctttgatgattatgccatgcactgggtccggcaagttccagggaagggcctggaatgggtctcaggcattagttggattcgtactggcataggctatgcggactctgtgaagggccgattcaccattttcagagacaacgccaagaattccctgtatctgcaaatgaacagtctgagagctgaggacacggccttgtattactgtgcaaaagatatgaagggttcggggacttatggggggtggttcgacacctggggccagggaaccctggtcaccgtctcctcagccaaaacaacagccccatcggtctatccactggcccctgc

SEQ ID NO: 35 - protein, 450 aa, Homo Sapiens
EVQLVESGGGLVQPGRSLRLSCAASGFTFDDYAMHWVRQVPGKGLEWVSGISWIRTGIGYADSVKGRFTIFRDNAKNSLYLQMNSLRAEDTALYYCAKDMKGSGTYGGWFDTWGQGTLVTVSSASTKGPSVFPLAPCSRSTSESTAALGCLVKDYFPEPVTVSWNSGALTSGVHTFPAVLQSSGLYSLSSVVTVPSSSLGTKTYTCNVDHKPSNTKVDKRVESKYGPPCPPCPAPEFEGGPSVFLFPPKPKDTLMISRTPEVTCVVVDVSQEDPEVQFNWYVDGVEVHNAKTKPREEQFNSTYRVVSVLTVLHQDWLNGKEYKCKVSNKGLPSSIEKTISKAKGQPREPQVYTLPPSQEEMTKNQVSLTCLVKGFYPSDIAVEWESNGQPENNYKTTPPVLDSDGSFFLYSRLTVDKSRWQEGNVFSCSVMHEALHNHYTQKSLSLSLGK

SEQ ID NO: 36 - DNA, 1359 bp, Homo Sapiens
gaagtgcagctggtggaatctggcggcggactggtgcagcctggcagatccctgagactgtcttgtgccgcctccggcttcaccttcgacgactacgctatgcactgggtgcgacaggtgccaggcaagggcctggaatgggtgtccggcatctcttggatccggaccggcatcggctacgccgactctgtgaagggccggttcaccatcttccgggacaacgccaagaactccctgtacctgcagatgaacagcctgcgggccgaggacaccgccctgtactactgcgccaaggacatgaagggctccggcacctacggcggatggttcgatacttggggccagggcaccctcgtgaccgtgtcctctgccagcaccaagggcccctctgtgttccctctggccccttccagcaagtccacctctggcggaacagccgctctgggctgcctcgtgaaggactacttccccgagcctgtgaccgtgtcctggaactctggcgctctgaccagcggagtgcacaccttccctgctgtgctgcagtcctccggcctgtactccctgtcctccgtcgtgaccgtgccttccagctctctgggcacccagacctacatctgcaacgtgaaccacaagccctccaacaccaaggtggacaagaaggtggaacccaagtcctgcgacaagacccacacctgtcccccttgtcctgcccctgaactgctgggcggaccttccgtgttcctgttccccccaaagcccaaggacaccctgatgatctcccggacccccgaagtgacctgcgtggtggtggatgtgtcccacgaggaccctgaagtgaagttcaattggtacgtggacggcgtggaagtgcacaacgccaagaccaagcctagagaggaacagtacaactccacctaccgggtggtgtccgtgctgaccgtgctgcaccaggattggctgaacggcaaagagtacaagtgcaaggtgtccaacaaggccctgcctgcccccatcgaaaagaccatctccaaggccaagggccagccccgggaaccccaggtgtacacactgccccctagcagggacgagctgaccaagaaccaggtgtccctgacctgtctcgtgaaaggcttctacccctccgatatcgccgtggaatgggagtccaacggccagcctgagaacaactacaagaccaccccccctgtgctggactccgacggctcattcttcctgtacagcaagctgacagtggacaagtcccggtggcagcagggcaacgtgttctcctgctccgtgatgcacgaggccctgcacaaccactacacccagaagtccctgtccctgagccccggcaag

SEQ ID NO: 37 - protein, 6 aa, Homo Sapiens
QSISSY

SEQ ID NO: 38 - protein, 3 aa, Homo Sapiens
VAS

SEQ ID NO: 39 - protein, 9 aa, Homo Sapiens
QQSYSTPIT

SEQ ID NO: 40 - protein, 11 aa, Homo Sapiens
RASQSISSYLN

SEQ ID NO: 41 - protein, 7 aa, Homo Sapiens
VASSLQS

SEQ ID NO: 42 - protein, 9 aa, Homo Sapiens
QQSYSTPIT

SEQ ID NO: 43 - protein, 107 aa, Homo Sapiens
DIQMTQSPSSLSASVGDRVTITCRASQSISSYLNWYQQKPGKAPKLLIYVASSLQSGVPSRFSGSGSGTDFTLTISSLQPEDFATYYCQQSYSTPITFGQGTRLEIK

SEQ ID NO: 44 - DNA, 418 bp, Homo Sapiens
aaagcttgccgccaccatgaggctccctgctcagcttctggggctcctgctactctggctccgaggtgccagatgtgacatccagatgacccagtctccatcctccctgtctgcatctgtaggagacagagtcaccatcacttgccgggcaagtcagagcattagcagctatttaaattggtatcagcagaaaccagggaaagcccctaaactcctgatctatgttgcatccagtttgcaaagtggggtcccatcaaggttcagtggcagtggatctgggacagatttcactctcactatcagcagtctgcaacctgaagattttgcaacttactactgtcaacagagttacagtaccccgatcaccttcggccaagggacacgtctggagatcaaacgtacggatgctgcaccaact

SEQ ID NO: 45 - protein, 214 aa, Homo Sapiens
DIQMTQSPSSLSASVGDRVTITCRASQSISSYLNWYQQKPGKAPKLLIYVASSLQSGVPSRFSGSGSGTDFTLTISSLQPEDFATYYCQQSYSTPITFGQGTRLEIKRTVAAPSVFIFPPSDEQLKSGTASVVCLLNNFYPREAKVQWKVDNALQSGNSQESVTEQDSKDSTYSLSSTLTLSKADYEKHKVYACEVTHQGLSSPVTKSFNRGEC

SEQ ID NO: 46 - DNA, 642 bp, Homo Sapiens
gacatccagatgacccagtccccctccagcctgtctgcttccgtgggcgacagagtgaccatcacctgtcgggcctcccagtccatctcctcctacctgaactggtatcagcagaagcccggcaaggcccccaagctgctgatctacgtggccagctctctgcagtccggcgtgccctctagattctccggctctggctctggcaccgactttaccctgaccatcagctccctgcagcccgaggacttcgccacctactactgccagcagtcctactccacccctatcaccttcggccagggcacccggctggaaatcaaacgtacggtggccgctccctccgtgttcatcttcccaccttccgacgagcagctgaagtccggcaccgcttctgtcgtgtgcctgctgaacaacttctacccccgcgaggccaaggtgcagtggaaggtggacaacgccctgcagtccggcaactcccaggaatccgtgaccgagcaggactccaaggacagcacctactccctgtcctccaccctgaccctgtccaaggccgactacgagaagcacaaggtgtacgcctgcgaagtgacccaccagggcctgtctagccccgtgaccaagtctttcaaccggggcgagtgt

SEQ ID NO: 47 - protein, 450 aa, Homo Sapiens
EVQLVESGGGLVQPGRSLRLSCAASGFTFDDYAMHWVRQAPGKGLEWVSGISWIRTGIGYADSVKGRFTIFRDNAKNSLYLQMNSLRAEDTALYYCAKDMKGSGTYGGWFDTWGQGTLVTVSSASTKGPSVFPLAPCSRSTSESTAALGCLVKDYFPEPVTVSWNSGALTSGVHTFPAVLQSSGLYSLSSVVTVPSSSLGTKTYTCNVDHKPSNTKVDKRVESKYGPPCPPCPAPELAGAPSVFLFPPKPKDTLMISRTPEVTCVVVDVSQEDPEVQFNWYVDGVEVHNAKTKPREEQFNSTYRVVSVLTVLHQDWLNGKEYKCKVSNKGLPSSIEKTISKAKGQPREPQVYTLPPSQEEMTKNQVSLTCLVKGFYPSDIAVEWESNGQPENNYKTTPPVLDSDGSFFLYSRLTVDKSRWQEGNVFSCSVMHEALHNHYTQKSLSLSLGK

SEQ ID NO: 48 - protein, 450 aa, Homo Sapiens
EVQLVESGGGLVQPGRSLRLSCAASGFTFDDYAMHWVRQVPGKGLEWVSGISWIRTGIGYADSVKGRFTISRDNAKNSLYLQMNSLRAEDTALYYCAKDMKGSGTYGGWFDTWGQGTLVTVSSASTKGPSVFPLAPCSRSTSESTAALGCLVKDYFPEPVTVSWNSGALTSGVHTFPAVLQSSGLYSLSSVVTVPSSSLGTKTYTCNVDHKPSNTKVDKRVESKYGPPCPPCPAPELAGAPSVFLFPPKPKDTLMISRTPEVTCVVVDVSQEDPEVQFNWYVDGVEVHNAKTKPREEQFNSTYRVVSVLTVLHQDWLNGKEYKCKVSNKGLPSSIEKTISKAKGQPREPQVYTLPPSQEEMTKNQVSLTCLVKGFYPSDIAVEWESNGQPENNYKTTPPVLDSDGSFFLYSRLTVDKSRWQEGNVFSCSVMHEALHNHYTQKSLSLSLGK

SEQ ID NO: 49 - protein, 448 aa, Homo Sapiens
EVQLVESGGGLVQPGRSLRLSCAASGFTFDDYAMHWVRQVPGKGLEWVSGISWIRTGIGYADSVKGRFTIFRDNAKNSLYLQMNSLRAEDTALYYCAKDMKGSGTYGGWFDTWGQGTLVTVSSASTKGPSVFPLAPCSRSTSESTAALGCLVKDYFPEPVTVSWNSGALTSGVHTFPAVLQSSGLYSLSSVVTVPSSSLGTKTYTCNVDHKPSNTKVDKRVESKYGPPCPPCPAPVAGPSVFLFPPKPKDTLMISRTPEVTCVVVDVSQEDPEVQFNWYVDGVEVHNAKTKPREEQFNSTYRVVSVLTVLHQDWLNGKEYKCKVSNKGLPSSIEKTISKAKGQPREPQVYTLPPSQEEMTKNQVSLTCLVKGFYPSDIAVEWESNGQPENNYKTTPPVLDSDGSFFLYSRLTVDKSRWQEGNVFSCSVMHEALHNHYTQKSLSLSLGK

SEQ ID NO: 50 - protein, 214 aa, Homo Sapiens
DIQMTQSPSSLSASVGDRVTITCRASQSISSYLNWYQQKPGKAPKLLIYAASSLQSGVPSRFSGSGSGTDFTLTISSLQPEDFATYYCQQSYSTPITFGQGTRLEIKRTVAAPSVFIFPPSDEQLKSGTASVVCLLNNFYPREAKVQWKVDNALQSGNSQESVTEQDSKDSTYSLSSTLTLSKADYEKHKVYACEVTHQGLSSPVTKSFNRGEC

SEQ ID NO: 51 - protein, 214 aa, Homo Sapiens
DIQMTQSPSSLSASVGDRVTITCRASQSISSYLNWYQQKPGKAPKLFIYVASSLQSGVPSRFSGSGSGTDFTLTISSLQPEDFATYYCQQSYSTPITFGQGTRLEIKRTVAAPSVFIFPPSDEQLKSGTASVVCLLNNFYPREAKVQWKVDNALQSGNSQESVTEQDSKDSTYSLSSTLTLSKADYEKHKVYACEVTHQGLSSPVTKSFNRGEC

SEQ ID NO: 52 - protein, 8 aa, Homo Sapiens
GFTFSSYW

SEQ ID NO: 53 - protein, 8 aa, Homo Sapiens
IKEDGSEK

SEQ ID NO: 54 - protein, 12 aa, Homo Sapiens
ARNRLYSDFLDN

SEQ ID NO: 55 - protein, 5 aa, Homo Sapiens
SYWMS

SEQ ID NO: 56 - protein, 17 aa, Homo Sapiens
NIKEDGSEKYYVDSVKG

SEQ ID NO: 57 - protein, 10 aa, Homo Sapiens
NRLYSDFLDN

SEQ ID NO: 58 - protein, 119 aa, Homo Sapiens
EVQLVESGGGLVQPGGSLRLSCAASGFTFSSYWMSWVRQAPGKGLEWVANIKEDGSEKYYVDSVKGRFTISRDNAKNSLYLQMNSLRAEDTSVYYCARNRLYSDFLDNWGQGTLVTVSS

SEQ ID NO: 59 - DNA, 358 bp, Homo Sapiens
gaggtgcagctggtggagtctgggggaggcttggtccagcctggggggtccctgagactctcctgtgcagcctctggattcacgtttagtagctattggatgagttgggtccgccaggctccagggaaggggctggagtgggtggccaacatcaaagaagatggaagtgagaaatactatgtcgactctgtgaagggccgattcaccatctccagagacaacgccaagaactcactgtatctgcaaatgaacagcctgagagccgaggacacgtctgtgtattactgtgcgagaaatcgactctacagtgacttccttgacaactggggccagggaaccctggtcaccgtctcctcag

SEQ ID NO: 60 - protein, 449 aa, Homo Sapiens
EVQLVESGGGLVQPGGSLRLSCAASGFTFSSYWMSWVRQAPGKGLEWVANIKEDGSEKYYVDSVKGRFTISRDNAKNSLYLQMNSLRAEDTSVYYCARNRLYSDFLDNWGQGTLVTVSSASTKGPSVFPLAPSSKSTSGGTAALGCLVKDYFPEPVTVSWNSGALTSGVHTFPAVLQSSGLYSLSSVVTVPSSSLGTQTYICNVNHKPSNTKVDKKVEPKSCDKTHTCPPCPAPELLGGPSVFLFPPKPKDTLMISRTPEVTCVVVDVSHEDPEVKFNWYVDGVEVHNAKTKPREEQYNSTYRVVSVLTVLHQDWLNGKEYKCKVSNKALPAPIEKTISKAKGQPREPQVYTLPPSRDELTKNQVSLTCLVKGFYPSDIAVEWESNGQPENNYKTTPPVLDSDGSFFLYSKLTVDKSRWQQGNVFSCSVMHEALHNHYTQKSLSLSPGK

SEQ ID NO: 61 - DNA, 1347 bp, Homo Sapiens
gaggtgcagctggtggagtctgggggaggcttggtccagcctggggggtccctgagactctcctgtgcagcctctggattcacgtttagtagctattggatgagttgggtccgccaggctccagggaaggggctggagtgggtggccaacatcaaagaagatggaagtgagaaatactatgtcgactctgtgaagggccgattcaccatctccagagacaacgccaagaactcactgtatctgcaaatgaacagcctgagagccgaggacacgtctgtgtattactgtgcgagaaatcgactctacagtgacttccttgacaactggggccagggaaccctggtcaccgtctcctcagccagcaccaagggcccctctgtgttccctctggccccttccagcaagtccacctctggcggaacagccgctctgggctgcctcgtgaaggactacttccccgagcctgtgaccgtgtcctggaactctggcgctctgaccagcggagtgcacaccttccctgctgtgctgcagtcctccggcctgtactccctgtcctccgtcgtgaccgtgccttccagctctctgggcacccagacctacatctgcaacgtgaaccacaagccctccaacaccaaggtggacaagaaggtggaacccaagtcctgcgacaagacccacacctgtcccccttgtcctgcccctgaactgctgggcggaccttccgtgttcctgttccccccaaagcccaaggacaccctgatgatctcccggacccccgaagtgacctgcgtggtggtggatgtgtcccacgaggaccctgaagtgaagttcaattggtacgtggacggcgtggaagtgcacaacgccaagaccaagcctagagaggaacagtacaactccacctaccgggtggtgtccgtgctgaccgtgctgcaccaggattggctgaacggcaaagagtacaagtgcaaggtgtccaacaaggccctgcctgcccccatcgaaaagaccatctccaaggccaagggccagccccgggaaccccaggtgtacacactgccccctagcagggacgagctgaccaagaaccaggtgtccctgacctgtctcgtgaaaggcttctacccctccgatatcgccgtggaatgggagtccaacggccagcctgagaacaactacaagaccaccccccctgtgctggactccgacggctcattcttcctgtacagcaagctgacagtggacaagtcccggtggcagcagggcaacgtgttctcctgctccgtgatgcacgaggccctgcacaaccactacacccagaagtccctgtccctgagccccggcaag

SEQ ID NO: 62 - protein, 6 aa, Homo Sapiens
QGVSSW

SEQ ID NO: 63 - protein, 3 aa, Homo Sapiens
GAS

SEQ ID NO: 64 - protein, 9 aa, Homo Sapiens
QQANSIPFT

SEQ ID NO: 65 - protein, 11 aa, Homo Sapiens
RASQGVSSWLA

SEQ ID NO: 66 - protein, 7 aa, Homo Sapiens
GASSLQS

SEQ ID NO: 67 - protein, 9 aa, Homo Sapiens
QQANSIPFT

SEQ ID NO: 68 - protein, 107 aa, Homo Sapiens
DIQMTQSPSSVSASVGDRVTITCRASQGVSSWLAWYQQKSGKAPKLLIYGASSLQSGVPSRFSGSGSGTEFILTISSLQPEDFATYYCQQANSIPFTFGPGTKVDIK

SEQ ID NO: 69 - DNA, 322 bp, Homo Sapiens
gacatccagatgacccagtctccatcttccgtgtctgcatctgtcggagacagagtcaccatcacttgtcgggcgagtcagggtgttagcagctggttagcctggtatcagcagaaatcagggaaagcccctaagctcctgatctatggtgcatccagtttgcaaagtggggtcccatcaagattcagcggcagtggatctgggacagagttcattctcaccatcagcagcctgcagcctgaagattttgcaacttactattgtcaacaggctaacagtatcccattcactttcggccctgggaccaaagtggatatcaaac

SEQ ID NO: 70 - protein, 214 aa, Homo Sapiens
DIQMTQSPSSVSASVGDRVTITCRASQGVSSWLAWYQQKSGKAPKLLIYGASSLQSGVPSRFSGSGSGTEFILTISSLQPEDFATYYCQQANSIPFTFGPGTKVDIKRTVAAPSVFIFPPSDEQLKSGTASVVCLLNNFYPREAKVQWKVDNALQSGNSQESVTEQDSKDSTYSLSSTLTLSKADYEKHKVYACEVTHQGLSSPVTKSFNRGEC

SEQ ID NO: 71 - DNA, 642 bp, Homo Sapiens
gacatccagatgacccagtctccatcttccgtgtctgcatctgtcggagacagagtcaccatcacttgtcgggcgagtcagggtgttagcagctggttagcctggtatcagcagaaatcagggaaagcccctaagctcctgatctatggtgcatccagtttgcaaagtggggtcccatcaagattcagcggcagtggatctgggacagagttcattctcaccatcagcagcctgcagcctgaagattttgcaacttactattgtcaacaggctaacagtatcccattcactttcggccctgggaccaaagtggatatcaaacgtacggtggccgctccctccgtgttcatcttcccaccttccgacgagcagctgaagtccggcaccgcttctgtcgtgtgcctgctgaacaacttctacccccgcgaggccaaggtgcagtggaaggtggacaacgccctgcagtccggcaactcccaggaatccgtgaccgagcaggactccaaggacagcacctactccctgtcctccaccctgaccctgtccaaggccgactacgagaagcacaaggtgtacgcctgcgaagtgacccaccagggcctgtctagccccgtgaccaagtctttcaaccggggcgagtgt

SEQ ID NO: 72 - protein, 8 aa, Homo Sapiens
GFTFSSYW

SEQ ID NO: 73 - protein, 8 aa, Homo Sapiens
IKEDGSEK

SEQ ID NO: 74 - protein, 12 aa, Homo Sapiens
ARVRLYSDFLDY

SEQ ID NO: 75 - protein, 5 aa, Homo Sapiens
SYWMS

SEQ ID NO: 76 - protein, 17 aa, Homo Sapiens
NIKEDGSEKYYVDSLKG

SEQ ID NO: 77 - protein, 10 aa, Homo Sapiens
VRLYSDFLDY

SEQ ID NO: 78 - protein, 119 aa, Homo Sapiens
EVQLVDSGGGLVQPGGSLRLSCAASGFTFSSYWMSWVRQAPGKGLEWVANIKEDGSEKYYVDSLKGRFTISRDNAKNSLYLQMNSLRAEDTSVYYCARVRLYSDFLDYWGQGTLVTVSS

SEQ ID NO: 79 - DNA, 358 bp, Homo Sapiens
gaggtgcagctggtggactctgggggaggcttggtccagcctggggggtccctgagactctcctgtgcagcctctggattcacgtttagtagctattggatgagttgggtccgccaggctccaggaaaggggctggagtgggtggccaacataaaagaagatggaagtgagaaatactatgtagactctttgaagggccgattcaccatctccagagacaacgccaagaactcactgtatctgcaaatgaacagcctgagagccgaggacacgtctgtgtattactgtgcgagagttcgactctacagtgacttccttgactactggggccagggaaccctggtcaccgtctcctcag

SEQ ID NO: 80 - protein, 449 aa, Homo Sapiens
EVQLVDSGGGLVQPGGSLRLSCAASGFTFSSYWMSWVRQAPGKGLEWVANIKEDGSEKYYVDSLKGRFTISRDNAKNSLYLQMNSLRAEDTSVYYCARVRLYSDFLDYWGQGTLVTVSSASTKGPSVFPLAPSSKSTSGGTAALGCLVKDYFPEPVTVSWNSGALTSGVHTFPAVLQSSGLYSLSSVVTVPSSSLGTQTYICNVNHKPSNTKVDKKVEPKSCDKTHTCPPCPAPELLGGPSVFLFPPKPKDTLMISRTPEVTCVVVDVSHEDPEVKFNWYVDGVEVHNAKTKPREEQYNSTYRVVSVLTVLHQDWLNGKEYKCKVSNKALPAPIEKTISKAKGQPREPQVYTLPPSRDELTKNQVSLTCLVKGFYPSDIAVEWESNGQPENNYKTTPPVLDSDGSFFLYSKLTVDKSRWQQGNVFSCSVMHEALHNHYTQKSLSLSPGK

SEQ ID NO: 81 - DNA, 1347 bp, Homo Sapiens
gaggtgcagctggtggactctgggggaggcttggtccagcctggggggtccctgagactctcctgtgcagcctctggattcacgtttagtagctattggatgagttgggtccgccaggctccaggaaaggggctggagtgggtggccaacataaaagaagatggaagtgagaaatactatgtagactctttgaagggccgattcaccatctccagagacaacgccaagaactcactgtatctgcaaatgaacagcctgagagccgaggacacgtctgtgtattactgtgcgagagttcgactctacagtgacttccttgactactggggccagggaaccctggtcaccgtctcctcagccagcaccaagggcccctctgtgttccctctggccccttccagcaagtccacctctggcggaacagccgctctgggctgcctcgtgaaggactacttccccgagcctgtgaccgtgtcctggaactctggcgctctgaccagcggagtgcacaccttccctgctgtgctgcagtcctccggcctgtactccctgtcctccgtcgtgaccgtgccttccagctctctgggcacccagacctacatctgcaacgtgaaccacaagccctccaacaccaaggtggacaagaaggtggaacccaagtcctgcgacaagacccacacctgtcccccttgtcctgcccctgaactgctgggcggaccttccgtgttcctgttccccccaaagcccaaggacaccctgatgatctcccggacccccgaagtgacctgcgtggtggtggatgtgtcccacgaggaccctgaagtgaagttcaattggtacgtggacggcgtggaagtgcacaacgccaagaccaagcctagagaggaacagtacaactccacctaccgggtggtgtccgtgctgaccgtgctgcaccaggattggctgaacggcaaagagtacaagtgcaaggtgtccaacaaggccctgcctgcccccatcgaaaagaccatctccaaggccaagggccagccccgggaaccccaggtgtacacactgccccctagcagggacgagctgaccaagaaccaggtgtccctgacctgtctcgtgaaaggcttctacccctccgatatcgccgtggaatgggagtccaacggccagcctgagaacaactacaagaccaccccccctgtgctggactccgacggctcattcttcctgtacagcaagctgacagtggacaagtcccggtggcagcagggcaacgtgttctcctgctccgtgatgcacgaggccctgcacaaccactacacccagaagtccctgtccctgagccccggcaag

SEQ ID NO: 82 - protein, 6 aa, Homo Sapiens
QGVSSW

SEQ ID NO: 83 - protein, 3 aa, Homo Sapiens
GAS

SEQ ID NO: 84 - protein, 9 aa, Homo Sapiens
QQANSIPFT

SEQ ID NO: 85 - protein, 11 aa, Homo Sapiens
RASQGVSSWLA

SEQ ID NO: 86 - protein, 7 aa, Homo Sapiens
GASSLQS

SEQ ID NO: 87 - protein, 9 aa, Homo Sapiens
QQANSIPFT

SEQ ID NO: 88 - protein, 107 aa, Homo Sapiens
DIQMTQSPSSVSASVGDRVTITCRASQGVSSWLAWYQQKSGKAPKLLIYGASSLQSGVPSRFSGSGSGTEFILSISSLQPEDFATYYCQQANSIPFTFGPGTKVDIK

SEQ ID NO: 89 - DNA, 322 bp, Homo Sapiens
gacatccagatgacccagtctccatcttccgtgtctgcatctgtcggagacagagtcaccatcacttgtcgggcgagtcagggtgttagcagttggttagcctggtatcagcagaaatcagggaaagcccctaagctcctgatctatggtgcctccagtttgcaaagtggggtcccatcaagattcagcggcagtggatctgggacagagttcattctcagcatcagcagcctgcagcctgaagattttgcaacttactattgtcaacaggctaacagtatcccattcactttcggccctgggaccaaagtggatatcaaac

SEQ ID NO: 90 - protein, 214 aa, Homo Sapiens
DIQMTQSPSSVSASVGDRVTITCRASQGVSSWLAWYQQKSGKAPKLLIYGASSLQSGVPSRFSGSGSGTEFILSISSLQPEDFATYYCQQANSIPFTFGPGTKVDIKRTVAAPSVFIFPPSDEQLKSGTASVVCLLNNFYPREAKVQWKVDNALQSGNSQESVTEQDSKDSTYSLSSTLTLSKADYEKHKVYACEVTHQGLSSPVTKSFNRGEC

SEQ ID NO: 91 - DNA, 642 bp, Homo Sapiens
gacatccagatgacccagtctccatcttccgtgtctgcatctgtcggagacagagtcaccatcacttgtcgggcgagtcagggtgttagcagttggttagcctggtatcagcagaaatcagggaaagcccctaagctcctgatctatggtgcctccagtttgcaaagtggggtcccatcaagattcagcggcagtggatctgggacagagttcattctcagcatcagcagcctgcagcctgaagattttgcaacttactattgtcaacaggctaacagtatcccattcactttcggccctgggaccaaagtggatatcaaacgtacggtggccgctccctccgtgttcatcttcccaccttccgacgagcagctgaagtccggcaccgcttctgtcgtgtgcctgctgaacaacttctacccccgcgaggccaaggtgcagtggaaggtggacaacgccctgcagtccggcaactcccaggaatccgtgaccgagcaggactccaaggacagcacctactccctgtcctccaccctgaccctgtccaaggccgactacgagaagcacaaggtgtacgcctgcgaagtgacccaccagggcctgtctagccccgtgaccaagtctttcaaccggggcgagtgt

SEQ ID NO: 92 - protein, 9 aa, Homo Sapiens
GGSIISSDW

SEQ ID NO: 93 - protein, 7 aa, Homo Sapiens
IFHSGRT

SEQ ID NO: 94 - protein, 8 aa, Homo Sapiens
ARDGSGSY

SEQ ID NO: 95 - protein, 6 aa, Homo Sapiens
SSDWWN

SEQ ID NO: 96 - protein, 16 aa, Homo Sapiens
EIFHSGRTNYNPSLKS

SEQ ID NO: 97 - protein, 6 aa, Homo Sapiens
DGSGSY

SEQ ID NO: 98 - protein, 115 aa, Homo Sapiens
QVQLQESGPGLVKPSGTLSLTCIVSGGSIISSDWWNWVRQPPGKGLEWIGEIFHSGRTNYNPSLKSRVTISIDKSKNQFSLRLSSVTAADTAVYYCARDGSGSYWGQGTLVTVSS

SEQ ID NO: 99 - DNA, 346 bp, Homo Sapiens
caggtgcagctgcaggagtcgggcccaggactggtgaagccttcggggaccctgtccctcacctgcattgtctctggtggctccatcatcagtagtgactggtggaattgggtccgccagcccccagggaaggggctggagtggattggagaaatctttcatagtgggaggaccaactacaacccgtccctcaagagtcgagtcaccatatcaatagacaagtccaagaatcagttctccctgaggctgagctctgtgaccgccgcggacacggccgtgtattactgtgcgagagatggttcggggagttactggggccagggaaccctggtcaccgtctcctcag

SEQ ID NO: 100 - protein, 445 aa, Homo Sapiens
QVQLQESGPGLVKPSGTLSLTCIVSGGSIISSDWWNWVRQPPGKGLEWIGEIFHSGRTNYNPSLKSRVTISIDKSKNQFSLRLSSVTAADTAVYYCARDGSGSYWGQGTLVTVSSASTKGPSVFPLAPSSKSTSGGTAALGCLVKDYFPEPVTVSWNSGALTSGVHTFPAVLQSSGLYSLSSVVTVPSSSLGTQTYICNVNHKPSNTKVDKKVEPKSCDKTHTCPPCPAPELLGGPSVFLFPPKPKDTLMISRTPEVTCVVVDVSHEDPEVKFNWYVDGVEVHNAKTKPREEQYNSTYRVVSVLTVLHQDWLNGKEYKCKVSNKALPAPIEKTISKAKGQPREPQVYTLPPSRDELTKNQVSLTCLVKGFYPSDIAVEWESNGQPENNYKTTPPVLDSDGSFFLYSKLTVDKSRWQQGNVFSCSVMHEALHNHYTQKSLSLSPGK

SEQ ID NO: 101 - DNA, 1335 bp, Homo Sapiens
caggtgcagctgcaggagtcgggcccaggactggtgaagccttcggggaccctgtccctcacctgcattgtctctggtggctccatcatcagtagtgactggtggaattgggtccgccagcccccagggaaggggctggagtggattggagaaatctttcatagtgggaggaccaactacaacccgtccctcaagagtcgagtcaccatatcaatagacaagtccaagaatcagttctccctgaggctgagctctgtgaccgccgcggacacggccgtgtattactgtgcgagagatggttcggggagttactggggccagggaaccctggtcaccgtctcctcagccagcaccaagggcccctctgtgttccctctggccccttccagcaagtccacctctggcggaacagccgctctgggctgcctcgtgaaggactacttccccgagcctgtgaccgtgtcctggaactctggcgctctgaccagcggagtgcacaccttccctgctgtgctgcagtcctccggcctgtactccctgtcctccgtcgtgaccgtgccttccagctctctgggcacccagacctacatctgcaacgtgaaccacaagccctccaacaccaaggtggacaagaaggtggaacccaagtcctgcgacaagacccacacctgtcccccttgtcctgcccctgaactgctgggcggaccttccgtgttcctgttccccccaaagcccaaggacaccctgatgatctcccggacccccgaagtgacctgcgtggtggtggatgtgtcccacgaggaccctgaagtgaagttcaattggtacgtggacggcgtggaagtgcacaacgccaagaccaagcctagagaggaacagtacaactccacctaccgggtggtgtccgtgctgaccgtgctgcaccaggattggctgaacggcaaagagtacaagtgcaaggtgtccaacaaggccctgcctgcccccatcgaaaagaccatctccaaggccaagggccagccccgggaaccccaggtgtacacactgccccctagcagggacgagctgaccaagaaccaggtgtccctgacctgtctcgtgaaaggcttctacccctccgatatcgccgtggaatgggagtccaacggccagcctgagaacaactacaagaccaccccccctgtgctggactccgacggctcattcttcctgtacagcaagctgacagtggacaagtcccggtggcagcagggcaacgtgttctcctgctccgtgatgcacgaggccctgcacaaccactacacccagaagtccctgtccctgagccccggcaag

SEQ ID NO: 102 - protein, 12 aa, Homo Sapiens
QSVLYSSNNKNY

SEQ ID NO: 103 - protein, 3 aa, Homo Sapiens
WAS

SEQ ID NO: 104 - protein, 8 aa, Homo Sapiens
QQYYSNRS

SEQ ID NO: 105 - protein, 17 aa, Homo Sapiens
KSSQSVLYSSNNKNYLA

SEQ ID NO: 106 - protein, 7 aa, Homo Sapiens
WASTRES

SEQ ID NO: 107 - protein, 8 aa, Homo Sapiens
QQYYSNRS

SEQ ID NO: 108 - protein, 112 aa, Homo Sapiens
DIVMTQSPDSLAVSLGERATINCKSSQSVLYSSNNKNYLAWYQQKSGQPPKLLIYWASTRESGVPDRFSGSGSGTDFTLTISSLQTEDVAVYYCQQYYSNRSFGQGTKLEIK

SEQ ID NO: 109 - DNA, 337 bp, Homo Sapiens
gacatcgtgatgacccagtctccagactccctggctgtgtctctgggcgagagggccaccatcaactgcaagtccagccagagtgttttatacagctccaacaataagaattacttagcttggtaccagcagaaatcaggacagcctcctaagttgctcatttactgggcatctacccgggaatccggggtccctgaccgattcagtggcagcgggtctgggacagatttcactctcaccatcagcagcctgcagactgaagatgtggcagtttattactgtcagcaatattatagtaatcgcagttttggccaggggaccaagctggagatcaaac

SEQ ID NO: 110 - protein, 219 aa, Homo Sapiens
DIVMTQSPDSLAVSLGERATINCKSSQSVLYSSNNKNYLAWYQQKSGQPPKLLIYWASTRESGVPDRFSGSGSGTDFTLTISSLQTEDVAVYYCQQYYSNRSFGQGTKLEIKRTVAAPSVFIFPPSDEQLKSGTASVVCLLNNFYPREAKVQWKVDNALQSGNSQESVTEQDSKDSTYSLSSTLTLSKADYEKHKVYACEVTHQGLSSPVTKSFNRGEC

SEQ ID NO: 111 - DNA, 657 bp, Homo Sapiens
gacatcgtgatgacccagtctccagactccctggctgtgtctctgggcgagagggccaccatcaactgcaagtccagccagagtgttttatacagctccaacaataagaattacttagcttggtaccagcagaaatcaggacagcctcctaagttgctcatttactgggcatctacccgggaatccggggtccctgaccgattcagtggcagcgggtctgggacagatttcactctcaccatcagcagcctgcagactgaagatgtggcagtttattactgtcagcaatattatagtaatcgcagttttggccaggggaccaagctggagatcaaacgtacggtggccgctccctccgtgttcatcttcccaccttccgacgagcagctgaagtccggcaccgcttctgtcgtgtgcctgctgaacaacttctacccccgcgaggccaaggtgcagtggaaggtggacaacgccctgcagtccggcaactcccaggaatccgtgaccgagcaggactccaaggacagcacctactccctgtcctccaccctgaccctgtccaaggccgactacgagaagcacaaggtgtacgcctgcgaagtgacccaccagggcctgtctagccccgtgaccaagtctttcaaccggggcgagtgt

SEQ ID NO: 112 - protein, 8 aa, Homo Sapiens
GFTFSSYW

SEQ ID NO: 113 - protein, 8 aa, Homo Sapiens
IKEDGSEK

SEQ ID NO: 114 - protein, 12 aa, Homo Sapiens
ARNRLYSDFLDN

SEQ ID NO: 115 - protein, 5 aa, Homo Sapiens
SYWMS

SEQ ID NO: 116 - protein, 17 aa, Homo Sapiens
NIKEDGSEKYYVDSVKG

SEQ ID NO: 117 - protein, 10 aa, Homo Sapiens
NRLYSDFLDN

SEQ ID NO: 118 - protein, 119 aa, Homo Sapiens; identical to SEQ ID NO: 58

SEQ ID NO: 119 - DNA, 358 bp, Homo Sapiens; identical to SEQ ID NO: 59

SEQ ID NO: 120 - protein, 449 aa, Homo Sapiens; identical to SEQ ID NO: 60

SEQ ID NO: 121 - DNA, 1347 bp, Homo Sapiens; identical to SEQ ID NO: 61

SEQ ID NO: 122 - protein, 6 aa, Homo Sapiens
QGVSSW

SEQ ID NO: 123 - protein, 3 aa, Homo Sapiens
GAS

SEQ ID NO: 124 - protein, 9 aa, Homo Sapiens
QQANSIPFT

SEQ ID NO: 125 - protein, 11 aa, Homo Sapiens
RASQGVSSWLA

SEQ ID NO: 126 - protein, 7 aa, Homo Sapiens
GASSLQS

SEQ ID NO: 127 - protein, 9 aa, Homo Sapiens
QQANSIPFT

SEQ ID NO: 128 - protein, 107 aa, Homo Sapiens; identical to SEQ ID NO: 68

SEQ ID NO: 129 - DNA, 322 bp, Homo Sapiens; identical to SEQ ID NO: 69

SEQ ID NO: 130 - protein, 214 aa, Homo Sapiens; identical to SEQ ID NO: 70

SEQ ID NO: 131 - DNA, 642 bp, Homo Sapiens; identical to SEQ ID NO: 71

SEQ ID NO: 132 - protein, 8 aa, Homo Sapiens
GFTFRIYG

SEQ ID NO: 133 - protein, 8 aa, Homo Sapiens
IWYDGSNK

SEQ ID NO: 134 - protein, 11 aa, Homo Sapiens
ARDMDYFGMDV

SEQ ID NO: 135 - protein, 5 aa, Homo Sapiens
IYGMH

SEQ ID NO: 136 - protein, 17 aa, Homo Sapiens
VIWYDGSNKYYADSVKG

SEQ ID NO: 137 - protein, 9 aa, Homo Sapiens
DMDYFGMDV

SEQ ID NO: 138 - protein, 118 aa, Homo Sapiens
QVQLVESGGGVVQPGRSLRLSCAASGFTFRIYGMHWVRQAPGKGLEWVAVIWYDGSNKYYADSVKGRFTISRDNSDNTLYLQMNSLRAEDTAVYYCARDMDYFGMDVWGQGTTVTVSS

SEQ ID NO: 139 - DNA, 355 bp, Homo Sapiens
caggtgcagctggtggagtctgggggaggcgtggtccagcctgggaggtccctgagactctcctgtgcagcgtctggattcaccttccgtatttatggcatgcactgggtccgccaggctccaggcaaggggctggagtgggtggcagttatatggtatgatggaagtaataaatactatgctgactccgtgaagggccgattcaccatctccagagacaattccgacaacacgctgtatctgcaaatgaacagcctgagagccgaggacacggctgtgtattactgtgcgagagatatggactacttcggtatggacgtctggggccaagggaccacggtcaccgtctcctcag

SEQ ID NO: 140 - protein, 448 aa, Homo Sapiens
QVQLVESGGGVVQPGRSLRLSCAASGFTFRIYGMHWVRQAPGKGLEWVAVIWYDGSNKYYADSVKGRFTISRDNSDNTLYLQMNSLRAEDTAVYYCARDMDYFGMDVWGQGTTVTVSSASTKGPSVFPLAPSSKSTSGGTAALGCLVKDYFPEPVTVSWNSGALTSGVHTFPAVLQSSGLYSLSSVVTVPSSSLGTQTYICNVNHKPSNTKVDKKVEPKSCDKTHTCPPCPAPELLGGPSVFLFPPKPKDTLMISRTPEVTCVVVDVSHEDPEVKFNWYVDGVEVHNAKTKPREEQYNSTYRVVSVLTVLHQDWLNGKEYKCKVSNKALPAPIEKTISKAKGQPREPQVYTLPPSRDELTKNQVSLTCLVKGFYPSDIAVEWESNGQPENNYKTTPPVLDSDGSFFLYSKLTVDKSRWQQGNVFSCSVMHEALHNHYTQKSLSLSPGK

SEQ ID NO: 141 - DNA, 1344 bp, Homo Sapiens
caggtgcagctggtggagtctgggggaggcgtggtccagcctgggaggtccctgagactctcctgtgcagcgtctggattcaccttccgtatttatggcatgcactgggtccgccaggctccaggcaaggggctggagtgggtggcagttatatggtatgatggaagtaataaatactatgctgactccgtgaagggccgattcaccatctccagagacaattccgacaacacgctgtatctgcaaatgaacagcctgagagccgaggacacggctgtgtattactgtgcgagagatatggactacttcggtatggacgtctggggccaagggaccacggtcaccgtctcctcagccagcaccaagggcccctctgtgttccctctggccccttccagcaagtccacctctggcggaacagccgctctgggctgcctcgtgaaggactacttccccgagcctgtgaccgtgtcctggaactctggcgctctgaccagcggagtgcacaccttccctgctgtgctgcagtcctccggcctgtactccctgtcctccgtcgtgaccgtgccttccagctctctgggcacccagacctacatctgcaacgtgaaccacaagccctccaacaccaaggtggacaagaaggtggaacccaagtcctgcgacaagacccacacctgtcccccttgtcctgcccctgaactgctgggcggaccttccgtgttcctgttccccccaaagcccaaggacaccctgatgatctcccggacccccgaagtgacctgcgtggtggtggatgtgtcccacgaggaccctgaagtgaagttcaattggtacgtggacggcgtggaagtgcacaacgccaagaccaagcctagagaggaacagtacaactccacctaccgggtggtgtccgtgctgaccgtgctgcaccaggattggctgaacggcaaagagtacaagtgcaaggtgtccaacaaggccctgcctgcccccatcgaaaagaccatctccaaggccaagggccagccccgggaaccccaggtgtacacactgccccctagcagggacgagctgaccaagaaccaggtgtccctgacctgtctcgtgaaaggcttctacccctccgatatcgccgtggaatgggagtccaacggccagcctgagaacaactacaagaccaccccccctgtgctggactccgacggctcattcttcctgtacagcaagctgacagtggacaagtcccggtggcagcagggcaacgtgttctcctgctccgtgatgcacgaggccctgcacaaccactacacccagaagtccctgtccctgagccccggcaag

SEQ ID NO: 142 - protein, 6 aa, Homo Sapiens
QGIRND

SEQ ID NO: 143 - protein, 3 aa, Homo Sapiens
AAS

SEQ ID NO: 144 - protein, 9 aa, Homo Sapiens
LQHNSYPRT

SEQ ID NO: 145 - protein, 11 aa, Homo Sapiens
RASQGIRNDLG

SEQ ID NO: 146 - protein, 7 aa, Homo Sapiens
AASSLQS

SEQ ID NO: 147 - protein, 9 aa, Homo Sapiens
LQHNSYPRT

SEQ ID NO: 148 - protein, 107 aa, Homo Sapiens
DLQMTQSPSSLSASVGDRVTITCRASQGIRNDLGWYQQKPGKAPKRLIYAASSLQSGVPSRFSGSGSGTEFTLTISSLQPEDFATYYCLQHNSYPRTFGQGTKVEIK

SEQ ID NO: 149 - DNA, 322 bp, Homo Sapiens
gacctccagatgacccagtctccatcctccctgtctgcatctgtaggagacagagtcaccatcacttgccgggcaagtcagggcattagaaatgatttaggctggtatcagcagaaaccagggaaagcccctaagcgcctgatctatgctgcatccagtttgcaaagtggggtcccatcaaggttcagcggcagtggatctgggacagaattcactctcacaatcagcagcctgcagcctgaagattttgcaacttattactgtctacagcataatagttaccctcggacgttcggccaagggaccaaggtggaaatcaaac

SEQ ID NO: 150 - protein, 214 aa, Homo Sapiens
DLQMTQSPSSLSASVGDRVTITCRASQGIRNDLGWYQQKPGKAPKRLIYAASSLQSGVPSRFSGSGSGTEFTLTISSLQPEDFATYYCLQHNSYPRTFGQGTKVEIKRTVAAPSVFIFPPSDEQLKSGTASVVCLLNNFYPREAKVQWKVDNALQSGNSQESVTEQDSKDSTYSLSSTLTLSKADYEKHKVYACEVTHQGLSSPVTKSFNRGEC

SEQ ID NO: 151 - DNA, 642 bp, Homo Sapiens
gacctccagatgacccagtctccatcctccctgtctgcatctgtaggagacagagtcaccatcacttgccgggcaagtcagggcattagaaatgatttaggctggtatcagcagaaaccagggaaagcccctaagcgcctgatctatgctgcatccagtttgcaaagtggggtcccatcaaggttcagcggcagtggatctgggacagaattcactctcacaatcagcagcctgcagcctgaagattttgcaacttattactgtctacagcataatagttaccctcggacgttcggccaagggaccaaggtggaaatcaaacgtacggtggccgctccctccgtgttcatcttcccaccttccgacgagcagctgaagtccggcaccgcttctgtcgtgtgcctgctgaacaacttctacccccgcgaggccaaggtgcagtggaaggtggacaacgccctgcagtccggcaactcccaggaatccgtgaccgagcaggactccaaggacagcacctactccctgtcctccaccctgaccctgtccaaggccgactacgagaagcacaaggtgtacgcctgcgaagtgacccaccagggcctgtctagccccgtgaccaagtctttcaaccggggcgagtgt

SEQ ID NO: 152 - protein, 9 aa, Homo Sapiens
GGSISSSDW

SEQ ID NO: 153 - protein, 7 aa, Homo Sapiens
IFHSGNT

SEQ ID NO: 154 - protein, 8 aa, Homo Sapiens
VRDGSGSY

SEQ ID NO: 155 - protein, 6 aa, Homo Sapiens
SSDWWS

SEQ ID NO: 156 - protein, 16 aa, Homo Sapiens
EIFHSGNTNYNPSLKS

SEQ ID NO: 157 - protein, 6 aa, Homo Sapiens
DGSGSY

SEQ ID NO: 158 - protein, 115 aa, Homo Sapiens
QVQLQESGPGLVKPSGTLSLTCAVSGGSISSSDWWSWVRQPPGKGLEWIGEIFHSGNTNYNPSLKSRVTISVDKSKNQISLRLNSVTAADTAVYYCVRDGSGSYWGQGTLVTVSS

SEQ ID NO: 159 - DNA, 346 bp, Homo Sapiens
caggtgcagctgcaggagtcgggcccaggactggtgaagccttcggggaccctgtccctcacctgcgctgtctctggtggctccatcagcagtagtgactggtggagttgggtccgccagcccccagggaaggggctggagtggattggggaaatctttcatagtgggaacaccaactacaacccgtccctcaagagtcgagtcaccatatcagtagacaagtccaagaaccagatctccctgaggctgaactctgtgaccgccgcggacacggccgtgtattactgtgtgagagatggttcggggagttactggggccagggaaccctggtcaccgtctcctcag

SEQ ID NO: 160 - protein, 445 aa, Homo Sapiens
QVQLQESGPGLVKPSGTLSLTCAVSGGSISSSDWWSWVRQPPGKGLEWIGEIFHSGNTNYNPSLKSRVTISVDKSKNQISLRLNSVTAADTAVYYCVRDGSGSYWGQGTLVTVSSASTKGPSVFPLAPSSKSTSGGTAALGCLVKDYFPEPVTVSWNSGALTSGVHTFPAVLQSSGLYSLSSVVTVPSSSLGTQTYICNVNHKPSNTKVDKKVEPKSCDKTHTCPPCPAPELLGGPSVFLFPPKPKDTLMISRTPEVTCVVVDVSHEDPEVKFNWYVDGVEVHNAKTKPREEQYNSTYRVVSVLTVLHQDWLNGKEYKCKVSNKALPAPIEKTISKAKGQPREPQVYTLPPSRDELTKNQVSLTCLVKGFYPSDIAVEWESNGQPENNYKTTPPVLDSDGSFFLYSKLTVDKSRWQQGNVFSCSVMHEALHNHYTQKSLSLSPGK

SEQ ID NO: 161 - DNA, 1335 bp, Homo Sapiens
caggtgcagctgcaggagtcgggcccaggactggtgaagccttcggggaccctgtccctcacctgcgctgtctctggtggctccatcagcagtagtgactggtggagttgggtccgccagcccccagggaaggggctggagtggattggggaaatctttcatagtgggaacaccaactacaacccgtccctcaagagtcgagtcaccatatcagtagacaagtccaagaaccagatctccctgaggctgaactctgtgaccgccgcggacacggccgtgtattactgtgtgagagatggttcggggagttactggggccagggaaccctggtcaccgtctcctcagccagcaccaagggcccctctgtgttccctctggccccttccagcaagtccacctctggcggaacagccgctctgggctgcctcgtgaaggactacttccccgagcctgtgaccgtgtcctggaactctggcgctctgaccagcggagtgcacaccttccctgctgtgctgcagtcctccggcctgtactccctgtcctccgtcgtgaccgtgccttccagctctctgggcacccagacctacatctgcaacgtgaaccacaagccctccaacaccaaggtggacaagaaggtggaacccaagtcctgcgacaagacccacacctgtcccccttgtcctgcccctgaactgctgggcggaccttccgtgttcctgttccccccaaagcccaaggacaccctgatgatctcccggacccccgaagtgacctgcgtggtggtggatgtgtcccacgaggaccctgaagtgaagttcaattggtacgtggacggcgtggaagtgcacaacgccaagaccaagcctagagaggaacagtacaactccacctaccgggtggtgtccgtgctgaccgtgctgcaccaggattggctgaacggcaaagagtacaagtgcaaggtgtccaacaaggccctgcctgcccccatcgaaaagaccatctccaaggccaagggccagccccgggaaccccaggtgtacacactgccccctagcagggacgagctgaccaagaaccaggtgtccctgacctgtctcgtgaaaggcttctacccctccgatatcgccgtggaatgggagtccaacggccagcctgagaacaactacaagaccaccccccctgtgctggactccgacggctcattcttcctgtacagcaagctgacagtggacaagtcccggtggcagcagggcaacgtgttctcctgctccgtgatgcacgaggccctgcacaaccactacacccagaagtccctgtccctgagccccggcaag

SEQ ID NO: 162 - protein, 12 aa, Homo Sapiens
QSVLYSSNNKNY

SEQ ID NO: 163 - protein, 3 aa, Homo Sapiens
WAS

SEQ ID NO: 164 - protein, 8 aa, Homo Sapiens
QQYYSTRS

SEQ ID NO: 165 - protein, 17 aa, Homo Sapiens
KSSQSVLYSSNNKNYLA

SEQ ID NO: 166 - protein, 7 aa, Homo Sapiens
WASTRES

SEQ ID NO: 167 - protein, 8 aa, Homo Sapiens
QQYYSTRS

SEQ ID NO: 168 - protein, 112 aa, Homo Sapiens
DIVMTQSPDSLAVSLGERATINCKSSQSVLYSSNNKNYLAWYQQKPGQPPKLLIYWASTRESGVPDRFSGSGSGTDFTLTISSLQAEDVAVYYCQQYYSTRSFGQGTKLEIK

SEQ ID NO: 169 - DNA, 337 bp, Homo Sapiens
gacatcgtgatgacccagtctccagactccctggctgtgtctctgggcgagagggccaccatcaactgcaagtccagccagagtgttttatacagctccaacaataagaactacttagcttggtaccagcagaaaccaggacagcctcctaaactgctcatttactgggcatctacccgggaatccggggtccctgaccgattcagtggcagcgggtctgggacagatttcactctcaccatcagcagcctgcaggctgaagatgtggcagtttattactgtcagcaatattatagtactcgcagttttggccaggggaccaagctggagatcaaac

SEQ ID NO: 170 - protein, 219 aa, Homo Sapiens
DIVMTQSPDSLAVSLGERATINCKSSQSVLYSSNNKNYLAWYQQKPGQPPKLLIYWASTRESGVPDRFSGSGSGTDFTLTISSLQAEDVAVYYCQQYYSTRSFGQGTKLEIKRTVAAPSVFIFPPSDEQLKSGTASVVCLLNNFYPREAKVQWKVDNALQSGNSQESVTEQDSKDSTYSLSSTLTLSKADYEKHKVYACEVTHQGLSSPVTKSFNRGEC

SEQ ID NO: 171 - DNA, 657 bp, Homo Sapiens
gacatcgtgatgacccagtctccagactccctggctgtgtctctgggcgagagggccaccatcaactgcaagtccagccagagtgttttatacagctccaacaataagaactacttagcttggtaccagcagaaaccaggacagcctcctaaactgctcatttactgggcatctacccgggaatccggggtccctgaccgattcagtggcagcgggtctgggacagatttcactctcaccatcagcagcctgcaggctgaagatgtggcagtttattactgtcagcaatattatagtactcgcagttttggccaggggaccaagctggagatcaaacgtacggtggccgctccctccgtgttcatcttcccaccttccgacgagcagctgaagtccggcaccgcttctgtcgtgtgcctgctgaacaacttctacccccgcgaggccaaggtgcagtggaaggtggacaacgccctgcagtccggcaactcccaggaatccgtgaccgagcaggactccaaggacagcacctactccctgtcctccaccctgaccctgtccaaggccgactacgagaagcacaaggtgtacgcctgcgaagtgacccaccagggcctgtctagccccgtgaccaagtctttcaaccggggcgagtgt

SEQ ID NO: 172 - protein, 10 aa, Homo Sapiens
GGSISSSSYY

SEQ ID NO: 173 - protein, 7 aa, Homo Sapiens
IYSTGYT

SEQ ID NO: 174 - protein, 13 aa, Homo Sapiens
AISTAAGPEYFHR

SEQ ID NO: 175 - protein, 7 aa, Homo Sapiens
SSSYYCG

SEQ ID NO: 176 - protein, 16 aa, Homo Sapiens
SIYSTGYTYYNPSLKS

SEQ ID NO: 177 - protein, 11 aa, Homo Sapiens
STAAGPEYFHR

SEQ ID NO: 178 - protein, 120 aa, Homo Sapiens
QLQESGPGLVKPSETLSLTCTVSGGSISSSSYYCGWIRQPPGKGLDWIGSIYSTGYTYYNPSLKSRVTISIDTSKNQFSCLILTSVTAADTAVYYCAISTAAGPEYFHRWGQGTLVTVSS

SEQ ID NO: 179 - DNA, 361 bp, Homo Sapiens
cagctgcaggagtcgggcccaggcctggtgaagccttcggagaccctgtccctcacctgcactgtctctggtggctccatcagcagtagtagttattactgcggctggatccgccagccccctgggaaggggctggactggattgggagtatctattctactgggtacacctactacaacccgtccctcaagagtcgagtcaccatttccatagacacgtccaagaaccagttctcatgcctgatactgacctctgtgaccgccgcagacacggctgtgtattactgtgcgataagtacagcagctggccctgaatacttccatcgctggggccagggcaccctggtcaccgtctcctcag

SEQ ID NO: 180 - protein, 450 aa, Homo Sapiens
QLQESGPGLVKPSETLSLTCTVSGGSISSSSYYCGWIRQPPGKGLDWIGSIYSTGYTYYNPSLKSRVTISIDTSKNQFSCLILTSVTAADTAVYYCAISTAAGPEYFHRWGQGTLVTVSSASTKGPSVFPLAPSSKSTSGGTAALGCLVKDYFPEPVTVSWNSGALTSGVHTFPAVLQSSGLYSLSSVVTVPSSSLGTQTYICNVNHKPSNTKVDKKVEPKSCDKTHTCPPCPAPELLGGPSVFLFPPKPKDTLMISRTPEVTCVVVDVSHEDPEVKFNWYVDGVEVHNAKTKPREEQYNSTYRVVSVLTVLHQDWLNGKEYKCKVSNKALPAPIEKTISKAKGQPREPQVYTLPPSRDELTKNQVSLTCLVKGFYPSDIAVEWESNGQPENNYKTTPPVLDSDGSFFLYSKLTVDKSRWQQGNVFSCSVMHEALHNHYTQKSLSLSPGK

SEQ ID NO: 181 - DNA, 1350 bp, Homo Sapiens
cagctgcaggagtcgggcccaggcctggtgaagccttcggagaccctgtccctcacctgcactgtctctggtggctccatcagcagtagtagttattactgcggctggatccgccagccccctgggaaggggctggactggattgggagtatctattctactgggtacacctactacaacccgtccctcaagagtcgagtcaccatttccatagacacgtccaagaaccagttctcatgcctgatactgacctctgtgaccgccgcagacacggctgtgtattactgtgcgataagtacagcagctggccctgaatacttccatcgctggggccagggcaccctggtcaccgtctcctcagccagcaccaagggcccctctgtgttccctctggccccttccagcaagtccacctctggcggaacagccgctctgggctgcctcgtgaaggactacttccccgagcctgtgaccgtgtcctggaactctggcgctctgaccagcggagtgcacaccttccctgctgtgctgcagtcctccggcctgtactccctgtcctccgtcgtgaccgtgccttccagctctctgggcacccagacctacatctgcaacgtgaaccacaagccctccaacaccaaggtggacaagaaggtggaacccaagtcctgcgacaagacccacacctgtcccccttgtcctgcccctgaactgctgggcggaccttccgtgttcctgttccccccaaagcccaaggacaccctgatgatctcccggacccccgaagtgacctgcgtggtggtggatgtgtcccacgaggaccctgaagtgaagttcaattggtacgtggacggcgtggaagtgcacaacgccaagaccaagcctagagaggaacagtacaactccacctaccgggtggtgtccgtgctgaccgtgctgcaccaggattggctgaacggcaaagagtacaagtgcaaggtgtccaacaaggccctgcctgcccccatcgaaaagaccatctccaaggccaagggccagccccgggaaccccaggtgtacacactgccccctagcagggacgagctgaccaagaaccaggtgtccctgacctgtctcgtgaaaggcttctacccctccgatatcgccgtggaatgggagtccaacggccagcctgagaacaactacaagaccaccccccctgtgctggactccgacggctcattcttcctgtacagcaagctgacagtggacaagtcccggtggcagcagggcaacgtgttctcctgctccgtgatgcacgaggccctgcacaaccactacacccagaagtccctgtccctgagccccggcaag

SEQ ID NO: 182 - protein, 12 aa, Homo Sapiens
QSVLYSSNSKNF

SEQ ID NO: 183 - protein, 3 aa, Homo Sapiens
WAS

SEQ ID NO: 184 - protein, 9 aa, Homo Sapiens
QQYYSTPRT

SEQ ID NO: 185 - protein, 17 aa, Homo Sapiens
KSSQSVLYSSNSKNFLA

SEQ ID NO: 186 - protein, 7 aa, Homo Sapiens
WASTRGS

SEQ ID NO: 187 - protein, 9 aa, Homo Sapiens
QQYYSTPRT

SEQ ID NO: 188 - protein, 113 aa, Homo Sapiens
DIVMTQSPDSLAVSLGERATINCKSSQSVLYSSNSKNFLAWYQQKPGQPPKLFIYWASTRGSGVPDRISGSGSGTDFNLTISSLQAEDVAVYYCQQYYSTPRTFGQGTKVEIK

SEQ ID NO: 189 - DNA, 340 bp, Homo Sapiens
gacatcgtgatgacccagtctccagactccctggctgtgtctctgggcgagagggccaccatcaactgcaagtccagccagagtgttttatacagctccaacagtaagaacttcttagcttggtaccagcagaaaccgggacagcctcctaagctgttcatttactgggcatctacccggggatccggggtccctgaccgaatcagtggcagcgggtctgggacagatttcaatctcaccatcagcagcctgcaggctgaagatgtggcagtttattactgtcaacaatattatagtactcctcggacgttcggccaagggaccaaggtggagatcaaac

SEQ ID NO: 190 - protein, 220 aa, Homo Sapiens
DIVMTQSPDSLAVSLGERATINCKSSQSVLYSSNSKNFLAWYQQKPGQPPKLFIYWASTRGSGVPDRISGSGSGTDFNLTISSLQAEDVAVYYCQQYYSTPRTFGQGTKVEIKRTVAAPSVFIFPPSDEQLKSGTASVVCLLNNFYPREAKVQWKVDNALQSGNSQESVTEQDSKDSTYSLSSTLTLSKADYEKHKVYACEVTHQGLSSPVTKSFNRGEC

SEQ ID NO: 191 - DNA, 660 bp, Homo Sapiens
gacatcgtgatgacccagtctccagactccctggctgtgtctctgggcgagagggccaccatcaactgcaagtccagccagagtgttttatacagctccaacagtaagaacttcttagcttggtaccagcagaaaccgggacagcctcctaagctgttcatttactgggcatctacccggggatccggggtccctgaccgaatcagtggcagcgggtctgggacagatttcaatctcaccatcagcagcctgcaggctgaagatgtggcagtttattactgtcaacaatattatagtactcctcggacgttcggccaagggaccaaggtggagatcaaacgtacggtggccgctccctccgtgttcatcttcccaccttccgacgagcagctgaagtccggcaccgcttctgtcgtgtgcctgctgaacaacttctacccccgcgaggccaaggtgcagtggaaggtggacaacgccctgcagtccggcaactcccaggaatccgtgaccgagcaggactccaaggacagcacctactccctgtcctccaccctgaccctgtccaaggccgactacgagaagcacaaggtgtacgcctgcgaagtgacccaccagggcctgtctagccccgtgaccaagtctttcaaccggggcgagtgt

SEQ ID NO: 192 - DNA, 981 bp, Homo Sapiens
gcttccaccaagggcccatccgtcttccccctggcgccctgctccaggagcacctccgagagcacagccgccctgggctgcctggtcaaggactacttccccgaaccggtgacggtgtcgtggaactcaggcgccctgaccagcggcgtgcacaccttcccggctgtcctacagtcctcaggactctactccctcagcagcgtggtgaccgtgccctccagcagcttgggcacgaagacctacacctgcaacgtagatcacaagcccagcaacaccaaggtggacaagagagttgagtccaaatatggtcccccatgcccatcatgcccagcacctgagttcctggggggaccatcagtcttcctgttccccccaaaacccaaggacactctcatgatctcccggacccctgaggtcacgtgcgtggtggtggacgtgagccaggaagaccccgaggtccagttcaactggtacgtggatggcgtggaggtgcataatgccaagacaaagccgcgggaggagcagttcaacagcacgtaccgtgtggtcagcgtcctcaccgtcctgcaccaggactggctgaacggcaaggagtacaagtgcaaggtctccaacaaaggcctcccgtcctccatcgagaaaaccatctccaaagccaaagggcagccccgagagccacaggtgtacaccctgcccccatcccaggaggagatgaccaagaaccaggtcagcctgacctgcctggtcaaaggcttctaccccagcgacatcgccgtggagtgggagagcaatgggcagccggagaacaactacaagaccacgcctcccgtgctggactccgacggctccttcttcctctacagcaggctaaccgtggacaagagcaggtggcaggaggggaatgtcttctcatgctccgtgatgcatgaggctctgcacaaccactacacacagaagagcctctccctgtctctgggtaaa

SEQ ID NO: 193 - protein, 327 aa, Homo Sapiens
ASTKGPSVFPLAPCSRSTSESTAALGCLVKDYFPEPVTVSWNSGALTSGVHTFPAVLQSSGLYSLSSVVTVPSSSLGTKTYTCNVDHKPSNTKVDKRVESKYGPPCPSCPAPEFLGGPSVFLFPPKPKDTLMISRTPEVTCVVVDVSQEDPEVQFNWYVDGVEVHNAKTKPREEQFNSTYRVVSVLTVLHQDWLNGKEYKCKVSNKGLPSSIEKTISKAKGQPREPQVYTLPPSQEEMTKNQVSLTCLVKGFYPSDIAVEWESNGQPENNYKTTPPVLDSDGSFFLYSRLTVDKSRWQEGNVFSCSVMHEALHNHYTQKSLSLSLGK

SEQ ID NO: 194 - DNA, 981 bp, Homo Sapiens
gcttccaccaagggcccatccgtcttccccctggcgccctgctccaggagcacctccgagagcacagccgccctgggctgcctggtcaaggactacttccccgaaccggtgacggtgtcgtggaactcaggcgccctgaccagcggcgtgcacaccttcccggctgtcctacagtcctcaggactctactccctcagcagcgtggtgaccgtgccctccagcagcttgggcacgaagacctacacctgcaacgtagatcacaagcccagcaacaccaaggtggacaagagagttgagtccaaatatggtcccccgtgcccatcatgcccagcacctgagttcctggggggaccatcagtcttcctgttccccccaaaacccaaggacactctcatgatctcccggacccctgaggtcacgtgcgtggtggtggacgtgagccaggaagaccccgaggtccagttcaactggtacgtggatggcgtggaggtgcataatgccaagacaaagccgcgggaggagcagttcaacagcacgtaccgtgtggtcagcgtcctcaccgtcgtgcaccaggactggctgaacggcaaggagtacaagtgcaaggtctccaacaaaggcctcccgtcctccatcgagaaaaccatctccaaagccaaagggcagccccgagagccacaggtgtacaccctgcccccatcccaggaggagatgaccaagaaccaggtcagcctgacctgcctggtcaaaggcttctaccccagcgacatcgccgtggagtgggagagcaatgggcagccggagaacaactacaagaccacgcctcccgtgctggactccgacggctccttcttcctctacagcaggctaaccgtggacaagagcaggtggcaggaggggaatgtcttctcatgctccgtgatgcatgaggctctgcacaaccactacacgcagaagagcctctccctgtctctgggtaaa

SEQ ID NO: 195 - protein, 327 aa, Homo Sapiens
ASTKGPSVFPLAPCSRSTSESTAALGCLVKDYFPEPVTVSWNSGALTSGVHTFPAVLQSSGLYSLSSVVTVPSSSLGTKTYTCNVDHKPSNTKVDKRVESKYGPPCPSCPAPEFLGGPSVFLFPPKPKDTLMISRTPEVTCVVVDVSQEDPEVQFNWYVDGVEVHNAKTKPREEQFNSTYRVVSVLTVVHQDWLNGKEYKCKVSNKGLPSSIEKTISKAKGQPREPQVYTLPPSQEEMTKNQVSLTCLVKGFYPSDIAVEWESNGQPENNYKTTPPVLDSDGSFFLYSRLTVDKSRWQEGNVFSCSVMHEALHNHYTQKSLSLSLGK

SEQ ID NO: 196 - DNA, 981 bp, Homo Sapiens
gcttccaccaagggcccatccgtcttccccctggcgccctgctccaggagcacctccgagagcacagccgccctgggctgcctggtcaaggactacttccccgaaccggtgacggtgtcgtggaactcaggcgccctgaccagcggcgtgcacaccttcccggctgtcctacagtcctcaggactctactccctcagcagcgtggtgaccgtgccctccagcagcttgggcacgaagacctacacctgcaacgtagatcacaagcccagcaacaccaaggtggacaagagagttgagtccaaatatggtcccccatgcccatcatgcccagcacctgagttcctggggggaccatcagtcttcctgttccccccaaaacccaaggacactctcatgatctcccggacccctgaggtcacgtgcgtggtggtggacgtgagccaggaagaccccgaggtccagttcaactggtacgtggatggcgtggaggtgcataatgccaagacaaagccgcgggaggagcagttcaacagcacgtaccgtgtggtcagcgtcctcaccgtcctgcaccaggactggctgaacggcaaggagtacaagtgcaaggtctccaacaaaggcctcccgtcctccatcgagaaaaccatctccaaagccaaagggcagccccgagagccacaggtgtacaccctgcccccatcccaggaggagatgaccaagaaccaggtcagcctgacctgcctggtcaaaggcttctaccccagcgacatcgccgtggagtgggagagcaatgggcagccggagaacaactacaagaccacgcctcccgtgctggactccgacggctccttcttcctctacagcaagctcaccgtggacaagagcaggtggcaggaggggaacgtcttctcatgctccgtgatgcatgaggctctgcacaaccactacacgcagaagagcctctccctgtctctgggtaaa

SEQ ID NO: 197 - protein, 327 aa, Homo Sapiens
ASTKGPSVFPLAPCSRSTSESTAALGCLVKDYFPEPVTVSWNSGALTSGVHTFPAVLQSSGLYSLSSVVTVPSSSLGTKTYTCNVDHKPSNTKVDKRVESKYGPPCPSCPAPEFLGGPSVFLFPPKPKDTLMISRTPEVTCVVVDVSQEDPEVQFNWYVDGVEVHNAKTKPREEQFNSTYRVVSVLTVLHQDWLNGKEYKCKVSNKGLPSSIEKTISKAKGQPREPQVYTLPPSQEEMTKNQVSLTCLVKGFYPSDIAVEWESNGQPENNYKTTPPVLDSDGSFFLYSKLTVDKSRWQEGNVFSCSVMHEALHNHYTQKSLSLSLGK

SEQ ID NO: 198 - DNA, 981 bp, Homo Sapiens
gcctccaccaagggcccatccgtcttccccctggcgccctgctccaggagcacctccgagagcacggccgccctgggctgcctggtcaaggactacttccccgaaccagtgacggtgtcgtggaactcaggcgccctgaccagcggcgtgcacaccttcccggctgtcctacagtcctcaggactctactccctcagcagcgtggtgaccgtgccctccagcagcttgggcacgaagacctacacctgcaacgtagatcacaagcccagcaacaccaaggtggacaagagagttgagtccaaatatggtcccccatgcccaccatgcccagcgcctgaatttgaggggggaccatcagtcttcctgttccccccaaaacccaaggacactctcatgatctcccggacccctgaggtcacgtgcgtggtggtggacgtgagccaggaagaccccgaggtccagttcaactggtacgtggatggcgtggaggtgcataatgccaagacaaagccgcgggaggagcagttcaacagcacgtaccgtgtggtcagcgtcctcaccgtcctgcaccaggactggctgaacggcaaggagtacaagtgcaaggtctccaacaaaggcctcccgtcatcgatcgagaaaaccatctccaaagccaaagggcagccccgagagccacaggtgtacaccctgcccccatcccaggaggagatgaccaagaaccaggtcagcctgacctgcctggtcaaaggcttctaccccagcgacatcgccgtggagtgggagagcaatgggcagccggagaacaactacaagaccacgcctcccgtgctggactccgacggatccttcttcctctacagcaggctaaccgtggacaagagcaggtggcaggaggggaatgtcttctcatgctccgtgatgcatgaggctctgcacaaccactacacacagaagagcctctccctgtctctgggtaaa

SEQ ID NO: 199 - protein, 327 aa, Homo Sapiens
ASTKGPSVFPLAPCSRSTSESTAALGCLVKDYFPEPVTVSWNSGALTSGVHTFPAVLQSSGLYSLSSVVTVPSSSLGTKTYTCNVDHKPSNTKVDKRVESKYGPPCPPCPAPEFEGGPSVFLFPPKPKDTLMISRTPEVTCVVVDVSQEDPEVQFNWYVDGVEVHNAKTKPREEQFNSTYRVVSVLTVLHQDWLNGKEYKCKVSNKGLPSSIEKTISKAKGQPREPQVYTLPPSQEEMTKNQVSLTCLVKGFYPSDIAVEWESNGQPENNYKTTPPVLDSDGSFFLYSRLTVDKSRWQEGNVFSCSVMHEALHNHYTQKSLSLSLGK

SEQ ID NO: 200 - DNA, 981 bp, Homo Sapiens
gcctccaccaagggacctagcgtgttccctctcgccccctgttccaggtccacaagcgagtccaccgctgccctcggctgtctggtgaaagactactttcccgagcccgtgaccgtctcctggaatagcggagccctgacctccggcgtgcacacatttcccgccgtgctgcagagcagcggactgtatagcctgagcagcgtggtgaccgtgcccagctccagcctcggcaccaaaacctacacctgcaacgtggaccacaagccctccaacaccaaggtggacaagcgggtggagagcaagtacggccccccttgccctccttgtcctgcccctgagttcgagggaggaccctccgtgttcctgtttccccccaaacccaaggacaccctgatgatctcccggacacccgaggtgacctgtgtggtcgtggacgtcagccaggaggaccccgaggtgcagttcaactggtatgtggacggcgtggaggtgcacaatgccaaaaccaagcccagggaggagcagttcaattccacctacagggtggtgagcgtgctgaccgtcctgcatcaggattggctgaacggcaaggagtacaagtgcaaggtgtccaacaagggactgcccagctccatcgagaagaccatcagcaaggctaagggccagccgagggagccccaggtgtataccctgcctcctagccaggaagagatgaccaagaaccaagtgtccctgacctgcctggtgaagggattctacccctccgacatcgccgtggagtgggagagcaatggccagcccgagaacaactacaaaacaacccctcccgtgctcgatagcgacggcagcttctttctctacagccggctgacagtggacaagagcaggtggcaggagggcaacgtgttctcctgttccgtgatgcacgaggccctgcacaatcactacacccagaagagcctctccctgtccctgggcaag

SEQ ID NO: 201 - DNA, 981 bp, Homo Sapiens
gccagcaccaagggcccttccgtgttccccctggccccttgcagcaggagcacctccgaatccacagctgccctgggctgtctggtgaaggactactttcccgagcccgtgaccgtgagctggaacagcggcgctctgacatccggcgtccacacctttcctgccgtcctgcagtcctccggcctctactccctgtcctccgtggtgaccgtgcctagctcctccctcggcaccaagacctacacctgtaacgtggaccacaaaccctccaacaccaaggtggacaaacgggtcgagagcaagtacggccctccctgccctccttgtcctgcccccgagttcgaaggcggacccagcgtgttcctgttccctcctaagcccaaggacaccctcatgatcagccggacacccgaggtgacctgcgtggtggtggatgtgagccaggaggaccctgaggtccagttcaactggtatgtggatggcgtggaggtgcacaacgccaagacaaagccccgggaagagcagttcaactccacctacagggtggtcagcgtgctgaccgtgctgcatcaggactggctgaacggcaaggagtacaagtgcaaggtcagcaataagggactgcccagcagcatcgagaagaccatctccaaggctaaaggccagccccgggaacctcaggtgtacaccctgcctcccagccaggaggagatgaccaagaaccaggtgagcctgacctgcctggtgaagggattctacccttccgacatcgccgtggagtgggagtccaacggccagcccgagaacaattataagaccacccctcccgtcctcgacagcgacggatccttctttctgtactccaggctgaccgtggataagtccaggtggcaggaaggcaacgtgttcagctgctccgtgatgcacgaggccctgcacaatcactacacccagaagtccctgagcctgtccctgggaaag

SEQ ID NO: 202 - DNA, 981 bp, Homo Sapiens
gcctccaccaagggcccatccgtcttccccctggcgccctgctccaggagcacctccgagagcacggccgccctgggctgcctggtcaaggactacttccccgaaccagtgacggtgtcgtggaactcaggcgccctgaccagcggcgtgcacaccttcccggctgtcctacagtcctcaggactctactccctcagcagcgtggtgaccgtgccctccagcagcttgggcacgaagacctacacctgcaacgtagatcacaagcccagcaacaccaaggtggacaagagagttgagtccaaatatggtcccccatgcccaccatgcccagcgcctccagttgcggggggaccatcagtcttcctgttccccccaaaacccaaggacactctcatgatctcccggacccctgaggtcacgtgcgtggtggtggacgtgagccaggaagaccccgaggtccagttcaactggtacgtggatggcgtggaggtgcataatgccaagacaaagccgcgggaggagcagttcaacagcacgtaccgtgtggtcagcgtcctcaccgtcctgcaccaggactggctgaacggcaaggagtacaagtgcaaggtctccaacaaaggcctcccgtcatcgatcgagaaaaccatctccaaagccaaagggcagccccgagagccacaggtgtacaccctgcccccatcccaggaggagatgaccaagaaccaggtcagcctgacctgcctggtcaaaggcttctaccccagcgacatcgccgtggagtgggagagcaatgggcagccggagaacaactacaagaccacgcctcccgtgctggactccgacggatccttcttcctctacagcaggctaaccgtggacaagagcaggtggcaggaggggaatgtcttctcatgctccgtgatgcatgaggctctgcacaaccactacacacagaagagcctctccctgtctctgggtaaa

SEQ ID NO: 203 - protein, 327 aa, Homo Sapiens
ASTKGPSVFPLAPCSRSTSESTAALGCLVKDYFPEPVTVSWNSGALTSGVHTFPAVLQSSGLYSLSSVVTVPSSSLGTKTYTCNVDHKPSNTKVDKRVESKYGPPCPPCPAPPVAGGPSVFLFPPKPKDTLMISRTPEVTCVVVDVSQEDPEVQFNWYVDGVEVHNAKTKPREEQFNSTYRVVSVLTVLHQDWLNGKEYKCKVSNKGLPSSIEKTISKAKGQPREPQVYTLPPSQEEMTKNQVSLTCLVKGFYPSDIAVEWESNGQPENNYKTTPPVLDSDGSFFLYSRLTVDKSRWQEGNVFSCSVMHEALHNHYTQKSLSLSLGK

SEQ ID NO: 204 - DNA, 990 bp, Homo Sapiens
gcctccaccaagggcccatcggtcttccccctggcaccctcctccaagagcacctctgggggcacagcggccctgggctgcctggtcaaggactacttccccgaaccggtgacggtgtcgtggaactcaggcgccctgaccagcggcgtgcacaccttcccggctgtcctacagtcctcaggactctactccctcagcagcgtggtgaccgtgccctccagcagcttgggcacccagacctacatctgcaacgtgaatcacaagcccagcaacaccaaggtggacaagaaagtggagcccaaatcttgtgacaaaactcacacatgcccaccgtgcccagcacctgaactcgcgggggcaccgtcagtcttcctcttccccccaaaacccaaggacaccctcatgatctcccggacccctgaggtcacatgcgtggtggtggacgtgagccacgaagaccctgaggtcaagttcaactggtacgtggacggcgtggaggtgcataatgccaagacaaagccgcgggaggagcagtacaacagcacgtaccgtgtggtcagcgtcctcaccgtcctgcaccaggactggctgaatggcaaggagtacaagtgcaaggtctccaacaaagccctcccagcccccatcgagaaaaccatctccaaagccaaagggcagccccgagaaccacaggtgtacaccctgcccccatcccgggatgagctgaccaagaaccaggtcagcctgacctgcctggtcaaaggcttctatcccagcgacatcgccgtggagtgggagagcaatgggcagccggagaacaactacaagaccacgcctcccgtgctggactccgacggctccttcttcctctacagcaagctcaccgtggacaagagcaggtggcagcaggggaacgtcttctcatgctccgtgatgcatgaggctctgcacaaccactacacgcagaagagcctctccctgtctccgggtaaa

SEQ ID NO: 205 - protein, 330 aa, Homo Sapiens
ASTKGPSVFPLAPSSKSTSGGTAALGCLVKDYFPEPVTVSWNSGALTSGVHTFPAVLQSSGLYSLSSVVTVPSSSLGTQTYICNVNHKPSNTKVDKKVEPKSCDKTHTCPPCPAPELAGAPSVFLFPPKPKDTLMISRTPEVTCVVVDVSHEDPEVKFNWYVDGVEVHNAKTKPREEQYNSTYRVVSVLTVLHQDWLNGKEYKCKVSNKALPAPIEKTISKAKGQPREPQVYTLPPSRDELTKNQVSLTCLVKGFYPSDIAVEWESNGQPENNYKTTPPVLDSDGSFFLYSKLTVDKSRWQQGNVFSCSVMHEALHNHYTQKSLSLSPGK

SEQ ID NO: 206 - DNA, 321 bp, Homo Sapiens
cgtacggtggccgctccctccgtgttcatcttcccaccttccgacgagcagctgaagtccggcaccgcttctgtcgtgtgcctgctgaacaacttctacccccgcgaggccaaggtgcagtggaaggtggacaacgccctgcagtccggcaactcccaggaatccgtgaccgagcaggactccaaggacagcacctactccctgtcctccaccctgaccctgtccaaggccgactacgagaagcacaaggtgtacgcctgcgaagtgacccaccagggcctgtctagccccgtgaccaagtctttcaaccggggcgagtgt

SEQ ID NO: 207 - protein, 107 aa, Homo Sapiens [sequence omitted]

SEQ ID NO: 208 - DNA, 321 bp, Homo Sapiens
cgaactgtggctgcaccatctgtcttcatcttcccgccatctgatgagcagttgaaatctggaactgcctctgttgtgtgcctgctgaataacttctatcccagagaggccaaagtacagtggaaggtggataacgccctccaatcgggtaactcccaggagagtgtcacagagcaggagagcaaggacagcacctacagcctcagcagcaccctgacgctgagcaaagcagactacgagaaacacaaagtctacgccggcgaagtcacccatcagggcctgagctcgcccgtcacaaagagcttcaacaggggagagtgt

SEQ ID NO: 209 - protein, 107 aa, Homo Sapiens
RTVAAPSVFIFPPSDEQLKSGTASVVCLLNNFYPREAKVQWKVDNALQSGNSQESVTEQESKDSTYSLSSTLTLSKADYEKHKVYAGEVTHQGLSSPVTKSFNRGEC

SEQ ID NO: 210 - DNA, 321 bp, Homo Sapiens
cgaactgtggctgcaccatctgtcttcatcttcccgccatctgatgagcagttgaaatctggaactgcctctgttgtgtgcctgctgaataacttctatcccagagaggccaaagtacagcggaaggtggataacgccctccaatcgggtaactcccaggagagtgtcacagagcaggagagcaaggacagcacctacagcctcagcagcaccctgacgctgagcaaagcagactacgagaaacacaaagtctacgcctgcgaagtcacccatcagggcctgagctcgcccgtcacaaagagcttcaacaggggagagtgt

SEQ ID NO: 211 - protein, 107 aa, Homo Sapiens
RTVAAPSVFIFPPSDEQLKSGTASVVCLLNNFYPREAKVQRKVDNALQSGNSQESVTEQESKDSTYSLSSTLTLSKADYEKHKVYACEVTHQGLSSPVTKSFNRGEC

SEQ ID NO: 212 - DNA, 321 bp, Homo Sapiens
cgaactgtggctgcaccatctgtcttcatcttcccgccatctgatgagcagttgaaatctggaactgcctctgttgtgtgcctgctgaataacttctatcccagagaggccaaagtacagtggaaggtggataacgccctccaatcgggtaactcccaggagagtgtcacagagcaggacagcaaggacagcacctacagcctcagcagcaccctgacgctgagcaaagcagactacgagaaacacaaactctacgcctgcgaagtcacccatcagggcctgagctcgcccgtcacaaagagcttcaacaggggagagtgt

SEQ ID NO: 213 - protein, 107 aa, Homo Sapiens
RTVAAPSVFIFPPSDEQLKSGTASVVCLLNNFYPREAKVQWKVDNALQSGNSQESVTEQDSKDSTYSLSSTLTLSKADYEKHKLYACEVTHQGLSSPVTKSFNRGEC

SEQ ID NO: 214 - DNA, 321 bp, Homo Sapiens
cgaactgtggctgcaccatctgtcttcatcttcccgccatctgatgagcagttgaaatctggaactgcctctgttgtgtgcctgctgaataacttctatcccagagaggccaaagtacagtggaaggtggataacgccctccaatcgggtaactcccaggagagtgtcacagagcaggacagcaaggacagcacctacagcctcagcaacaccctgacgctgagcaaagcagactacgagaaacacaaagtctacgcctgcgaagtcacccatcagggcctgagctcgcccgtcacaaagagcttcaacaggggagagtgc

SEQ ID NO: 215 - protein, 107 aa, Homo Sapiens
RTVAAPSVFIFPPSDEQLKSGTASVVCLLNNFYPREAKVQWKVDNALQSGNSQESVTEQDSKDSTYSLSNTLTLSKADYEKHKVYACEVTHQGLSSPVTKSFNRGEC

SEQ ID NO: 216 - DNA, 312 bp, Homo Sapiens
cccaaggccaaccccacggtcactctgttcccgccctcctctgaggagctccaagccaacaaggccacactagtgtgtctgatcagtgacttctacccgggagctgtgacagtggcttggaaggcagatggcagccccgtcaaggcgggagtggagacgaccaaaccctccaaacagagcaacaacaagtacgcggccagcagctacctgagcctgacgcccgagcagtggaagtcccacagaagctacagctgccaggtcacgcatgaagggagcaccgtggagaagacagtggcccctacagaatgttca

SEQ ID NO: 217 - protein, 104 aa, Homo Sapiens
PKANPTVTLFPPSSEELQANKATLVCLISDFYPGAVTVAWKADGSPVKAGVETTKPSKQSNNKYAASSYLSLTPEQWKSHRSYSCQVTHEGSTVEKTVAPTECS

SEQ ID NO: 218 - DNA, 318 bp, Homo Sapiens
ggtcagcccaaggccaaccccactgtcactctgttcccgccctcctctgaggagctccaagccaacaaggccacactagtgtgtctgatcagtgacttctacccgggagctgtgacagtggcctggaaggcagatggcagccccgtcaaggcgggagtggagaccaccaaaccctccaaacagagcaacaacaagtacgcggccagcagctacctgagcctgacgcccgagcagtggaagtcccacagaagctacagctgccaggtcacgcatgaagggagcaccgtggagaagacagtggcccctacagaatgttca

SEQ ID NO: 219 - protein, 106 aa, Homo Sapiens
GQPKANPTVTLFPPSSEELQANKATLVCLISDFYPGAVTVAWKADGSPVKAGVETTKPSKQSNNKYAASSYLSLTPEQWKSHRSYSCQVTHEGSTVEKTVAPTECS

SEQ ID NO: 220 - DNA, 318 bp, Homo Sapiens; identical to SEQ ID NO: 218

SEQ ID NO: 221 - DNA, 318 bp, Homo Sapiens
ggccagcctaaggccgctccttctgtgaccctgttccccccatcctccgaggaactgcaggctaacaaggccaccctcgtgtgcctgatcagcgacttctaccctggcgccgtgaccgtggcctggaaggctgatagctctcctgtgaaggccggcgtggaaaccaccaccccttccaagcagtccaacaacaaatacgccgcctcctcctacctgtccctgacccctgagcagtggaagtcccaccggtcctacagctgccaagtgacccacgagggctccaccgtggaaaagaccgtggctcctaccgagtgctcc

SEQ ID NO: 222 - DNA, 318 bp, Homo Sapiens
ggccagcctaaagctgcccccagcgtcaccctgtttcctccctccagcgaggagctccaggccaacaaggccaccctcgtgtgcctgatctccgacttctatcccggcgctgtgaccgtggcttggaaagccgactccagccctgtcaaagccggcgtggagaccaccacaccctccaagcagtccaacaacaagtacgccgcctccagctatctctccctgacccctgagcagtggaagtcccaccggtcctactcctgtcaggtgacccacgagggctccaccgtggaaaagaccgtcgcccccaccgagtgctcc

SEQ ID NO: 223 - protein, 106 aa, Homo Sapiens; identical to SEQ ID NO: 219

SEQ ID NO: 224 - DNA, 318 bp, Homo Sapiens
ggtcagcccaaggctgccccctcggtcactctgttcccgccctcctctgaggagcttcaagccaacaaggccacactggtgtgtctcataagtgacttctacccgggagccgtgacagtggcctggaaggcagatagcagccccgtcaaggcgggagtggagaccaccacaccctccaaacaaagcaacaacaagtacgcggccagcagctatctgagcctgacgcctgagcagtggaagtcccacagaagctacagctgccaggtcacgcatgaagggagcaccgtggagaagacagtggcccctacagaatgttca

SEQ ID NO: 225 - protein, 106 aa, Homo Sapiens
GQPKAAPSVTLFPPSSEELQANKATLVCLISDFYPGAVTVAWKADSSPVKAGVETTTPSKQSNNKYAASSYLSLTPEQWKSHRSYSCQVTHEGSTVEKTVAPTECS

SEQ ID NO: 226 - DNA, 312 bp, Homo Sapiens
cccaaggctgccccctcggtcactctgttcccaccctcctctgaggagcttcaagccaacaaggccacactggtgtgtctcataagtgacttctacccgggagccgtgacagttgcctggaaggcagatagcagccccgtcaaggcgggggtggagaccaccacaccctccaaacaaagcaacaacaagtacgcggccagcagctacctgagcctgacgcctgagcagtggaagtcccacaaaagctacagctgccaggtcacgcatgaagggagcaccgtggagaagacagttgcccctacggaatgttca

SEQ ID NO: 227 - protein, 104 aa, Homo Sapiens
PKAAPSVTLFPPSSEELQANKATLVCLISDFYPGAVTVAWKADSSPVKAGVETTTPSKQSNNKYAASSYLSLTPEQWKSHKSYSCQVTHEGSTVEKTVAPTECS

SEQ ID NO: 228 - DNA, 318 bp, Homo Sapiens
ggtcagcccaaggctgccccctcggtcactctgttcccaccctcctctgaggagcttcaagccaacaaggccacactggtgtgtctcataagtgacttctacccggggccagtgacagttgcctggaaggcagatagcagccccgtcaaggcgggggtggagaccaccacaccctccaaacaaagcaacaacaagtacgcggccagcagctacctgagcctgacgcctgagcagtggaagtcccacaaaagctacagctgccaggtcacgcatgaagggagcaccgtggagaagacagtggcccctacggaatgttca

SEQ ID NO: 229 - protein, 106 aa, Homo Sapiens
GQPKAAPSVTLFPPSSEELQANKATLVCLISDFYPGPVTVAWKADSSPVKAGVETTTPSKQSNNKYAASSYLSLTPEQWKSHKSYSCQVTHEGSTVEKTVAPTECS

SEQ ID NO: 230 - DNA, 318 bp, Homo Sapiens
ggtcagcccaaggctgccccctcggtcactctgttcccaccctcctctgaggagcttcaagccaacaaggccacactggtgtgtctcataagtgacttctacccgggagccgtgacagtggcctggaaggcagatagcagccccgtcaaggcgggagtggagaccaccacaccctccaaacaaagcaacaacaagtacgcggccagcagctacctgagcctgacgcctgagcagtggaagtcccacaaaagctacagctgccaggtcacgcatgaagggagcaccgtggagaagacagtggcccctacagaatgttca

SEQ ID NO: 231 - protein, 106 aa, Homo Sapiens
GQPKAAPSVTLFPPSSEELQANKATLVCLISDFYPGAVTVAWKADSSPVKAGVETTTPSKQSNNKYAASSYLSLTPEQWKSHKSYSCQVTHEGSTVEKTVAPTECS

SEQ ID NO: 232 - DNA, 318 bp, Homo Sapiens
ggtcagcccaaggctgccccctcggtcactctgttcccgccctcctctgaggagcttcaagccaacaaggccacactggtgtgtctcataagtgacttctacccgggagccgtgacagtggcctggaaggcagatagcagccccgtcaaggcgggagtggagaccaccacaccctccaaacaaagcaacaacaagtacgcggccagcagctacctgagcctgacgcctgagcagtggaagtcccacagaagctacagctgccaggtcacgcatgaagggagcaccgtggagaagacagtggcccctacagaatgttca

SEQ ID NO: 233 - protein, 106 aa, Homo Sapiens; identical to SEQ ID NO: 225

SEQ ID NO: 234 - DNA, 318 bp, Homo Sapiens
ggtcagcccaaggctgccccatcggtcactctgttcccgccctcctctgaggagcttcaagccaacaaggccacactggtgtgcctgatcagtgacttctacccgggagctgtgaaagtggcctggaaggcagatggcagccccgtcaacacgggagtggagaccaccacaccctccaaacagagcaacaacaagtacgcggccagcagctacctgagcctgacgcctgagcagtggaagtcccacagaagctacagctgccaggtcacgcatgaagggagcaccgtggagaagacagtggcccctgcagaatgttca

SEQ ID NO: 235 - protein, 106 aa, Homo Sapiens
GQPKAAPSVTLFPPSSEELQANKATLVCLISDFYPGAVKVAWKADGSPVNTGVETTTPSKQSNNKYAASSYLSLTPEQWKSHRSYSCQVTHEGSTVEKTVAPAECS

SEQ ID NO: 236 - DNA, 318 bp, Homo Sapiens
ggtcagcccaaggctgccccatcggtcactctgttcccaccctcctctgaggagcttcaagccaacaaggccacactggtgtgtctcgtaagtgacttctacccgggagccgtgacagtggcctggaaggcagatggcagccccgtcaaggtgggagtggagaccaccaaaccctccaaacaaagcaacaacaagtatgcggccagcagctacctgagcctgacgcccgagcagtggaagtcccacagaagctacagctgccgggtcacgcatgaagggagcaccgtggagaagacagtggcccctgcagaatgctct

SEQ ID NO: 237 - protein, 106 aa, Homo Sapiens
GQPKAAPSVTLFPPSSEELQANKATLVCLVSDFYPGAVTVAWKADGSPVKVGVETTKPSKQSNNKYAASSYLSLTPEQWKSHRSYSCRVTHEGSTVEKTVAPAECS

SEQ ID NO: 238 - protein, 8 aa, Homo Sapiens
GFTFSDYY

SEQ ID NO: 239 - protein, 8 aa, Homo Sapiens
ISTSGSTI

SEQ ID NO: 240 - protein, 16 aa, Homo Sapiens
ARGITGTNFYHYGLGV

SEQ ID NO: 241 - protein, 5 aa, Homo Sapiens
DYYMS

SEQ ID NO: 242 - protein, 17 aa, Homo Sapiens
YISTSGSTIYYADSVKG

SEQ ID NO: 243 - protein, 14 aa, Homo Sapiens
GITGTNFYHYGLGV

SEQ ID NO: 244 - protein, 123 aa, Homo Sapiens
QVQLVESGGGLVKPGGSLRLSCAASGFTFSDYYMSWIRQVPGKGLEWVSYISTSGSTIYYADSVKGRFTISRDNAKNSLYLQMNSLRAEDAAVYHCARGITGTNFYHYGLGVWGQGTTVTVSS

SEQ ID NO: 245 - DNA, 370 bp, Homo Sapiens
caggtgcagctggtggagtctgggggaggcttggtcaagcctggagggtccctgagactctcctgtgcagcctctggattcaccttcagtgactactacatgagctggatccgccaggttccagggaaggggctggagtgggtttcatacattagtactagtggtagtaccatatactacgcagactctgtgaagggccgattcaccatctccagggacaacgccaagaactcactgtatctacaaatgaacagcctgagagccgaggacgcggccgtgtatcactgtgcgagaggtataactggaactaacttctaccactacggtttgggcgtctggggccaagggaccacggtcaccgtctcctcag

SEQ ID NO: 246 - protein, 453 aa, Homo Sapiens
QVQLVESGGGLVKPGGSLRLSCAASGFTFSDYYMSWIRQVPGKGLEWVSYISTSGSTIYYADSVKGRFTISRDNAKNSLYLQMNSLRAEDAAVYHCARGITGTNFYHYGLGVWGQGTTVTVSSASTKGPSVFPLAPSSKSTSGGTAALGCLVKDYFPEPVTVSWNSGALTSGVHTFPAVLQSSGLYSLSSVVTVPSSSLGTQTYICNVNHKPSNTKVDKKVEPKSCDKTHTCPPCPAPELLGGPSVFLFPPKPKDTLMISRTPEVTCVVVDVSHEDPEVKFNWYVDGVEVHNAKTKPREEQYNSTYRVVSVLTVLHQDWLNGKEYKCKVSNKALPAPIEKTISKAKGQPREPQVYTLPPSRDELTKNQVSLTCLVKGFYPSDIAVEWESNGQPENNYKTTPPVLDSDGSFFLYSKLTVDKSRWQQGNVFSCSVMHEALHNHYTQKSLSLSPGK

SEQ ID NO: 247 - DNA, 1359 bp, Homo Sapiens
caggtgcagctggtggagtctgggggaggcttggtcaagcctggagggtccctgagactctcctgtgcagcctctggattcaccttcagtgactactacatgagctggatccgccaggttccagggaaggggctggagtgggtttcatacattagtactagtggtagtaccatatactacgcagactctgtgaagggccgattcaccatctccagggacaacgccaagaactcactgtatctacaaatgaacagcctgagagccgaggacgcggccgtgtatcactgtgcgagaggtataactggaactaacttctaccactacggtttgggcgtctggggccaagggaccacggtcaccgtctcctcagccagcaccaagggcccctctgtgttccctctggccccttccagcaagtccacctctggcggaacagccgctctgggctgcctcgtgaaggactacttccccgagcctgtgaccgtgtcctggaactctggcgctctgaccagcggagtgcacaccttccctgctgtgctgcagtcctccggcctgtactccctgtcctccgtcgtgaccgtgccttccagctctctgggcacccagacctacatctgcaacgtgaaccacaagccctccaacaccaaggtggacaagaaggtggaacccaagtcctgcgacaagacccacacctgtcccccttgtcctgcccctgaactgctgggcggaccttccgtgttcctgttccccccaaagcccaaggacaccctgatgatctcccggacccccgaagtgacctgcgtggtggtggatgtgtcccacgaggaccctgaagtgaagttcaattggtacgtggacggcgtggaagtgcacaacgccaagaccaagcctagagaggaacagtacaactccacctaccgggtggtgtccgtgctgaccgtgctgcaccaggattggctgaacggcaaagagtacaagtgcaaggtgtccaacaaggccctgcctgcccccatcgaaaagaccatctccaaggccaagggccagccccgggaaccccaggtgtacacactgccccctagcagggacgagctgaccaagaaccaggtgtccctgacctgtctcgtgaaaggcttctacccctccgatatcgccgtggaatgggagtccaacggccagcctgagaacaactacaagaccaccccccctgtgctggactccgacggctcattcttcctgtacagcaagctgacagtggacaagtcccggtggcagcagggcaacgtgttctcctgctccgtgatgcacgaggccctgcacaaccactacacccagaagtccctgtccctgagccccggcaag

SEQ ID NO: 248 - protein, 6 aa, Homo Sapiens
QGINSW

SEQ ID NO: 249 - protein, 3 aa, Homo Sapiens
AAS

SEQ ID NO: 250 - protein, 9 aa, Homo Sapiens
QQVNSFPLT

SEQ ID NO: 251 - protein, 11 aa, Homo Sapiens
RASQGINSWLA

SEQ ID NO: 252 - protein, 7 aa, Homo Sapiens
AASTLQS

SEQ ID NO: 253 - protein, 9 aa, Homo Sapiens
QQVNSFPLT

SEQ ID NO: 254 - protein, 107 aa, Homo Sapiens
DIQMTQSPSSVSASVGDRVTITCRASQGINSWLAWYQQKPGKAPKLLIYAASTLQSGVPSRFSGSGSGADFTLTISSLQPEDFATYYCQQVNSFPLTFGGGTKVEIK

SEQ ID NO: 255 - DNA, 322 bp, Homo Sapiens
gacatccagatgacccagtctccatcttccgtgtctgcatctgtaggagacagagtcaccatcacttgtcgggcgagtcagggtattaacagctggttagcctggtatcagcagaaaccagggaaagcccctaagctcctgatctatgctgcatccactttgcaaagtggggtcccatcaaggttcagcggcagtgggtctggggcagatttcactctcaccatcagcagcctgcagcctgaagattttgcaacttactattgtcaacaggttaacagtttcccgctcactttcggcggagggaccaaggtggagatcaaac

SEQ ID NO: 256 - protein, 214 aa, Homo Sapiens
DIQMTQSPSSVSASVGDRVTITCRASQGINSWLAWYQQKPGKAPKLLIYAASTLQSGVPSRFSGSGSGADFTLTISSLQPEDFATYYCQQVNSFPLTFGGGTKVEIKRTVAAPSVFIFPPSDEQLKSGTASVVCLLNNFYPREAKVQWKVDNALQSGNSQESVTEQDSKDSTYSLSSTLTLSKADYEKHKVYACEVTHQGLSSPVTKSFNRGEC

SEQ ID NO: 257 - DNA, 642 bp, Homo Sapiens
gacatccagatgacccagtctccatcttccgtgtctgcatctgtaggagacagagtcaccatcacttgtcgggcgagtcagggtattaacagctggttagcctggtatcagcagaaaccagggaaagcccctaagctcctgatctatgctgcatccactttgcaaagtggggtcccatcaaggttcagcggcagtgggtctggggcagatttcactctcaccatcagcagcctgcagcctgaagattttgcaacttactattgtcaacaggttaacagtttcccgctcactttcggcggagggaccaaggtggagatcaaacgtacggtggccgctccctccgtgttcatcttcccaccttccgacgagcagctgaagtccggcaccgcttctgtcgtgtgcctgctgaacaacttctacccccgcgaggccaaggtgcagtggaaggtggacaacgccctgcagtccggcaactcccaggaatccgtgaccgagcaggactccaaggacagcacctactccctgtcctccaccctgaccctgtccaaggccgactacgagaagcacaaggtgtacgcctgcgaagtgacccaccagggcctgtctagccccgtgaccaagtctttcaaccggggcgagtgt

SEQ ID NO: 258 - protein, 8 aa, Homo Sapiens
GFTFSYYA

SEQ ID NO: 259 - protein, 8 aa, Homo Sapiens
ISGGGGNT

SEQ ID NO: 260 - protein, 16 aa, Homo Sapiens
AKDRMKQLVRAYYFDY

SEQ ID NO: 261 - protein, 5 aa, Homo Sapiens
YYAMS

SEQ ID NO: 262 - protein, 17 aa, Homo Sapiens
TISGGGGNTHYADSVKG

SEQ ID NO: 263 - protein, 14 aa, Homo Sapiens
DRMKQLVRAYYFDY

SEQ ID NO: 264 - protein, 123 aa, Homo Sapiens
EVPLVESGGGLVQPGGSLRLSCAASGFTFSYYAMSWVRQAPGKGLDWVSTISGGGGNTHYADSVKGRFTISRDNSKNTLYLHMNSLRAEDTAVYYCAKDRMKQLVRAYYFDYWGQGTLVTVSS

SEQ ID NO: 265 - DNA, 370 bp, Homo Sapiens
gaggtgccgctggtggagtctgggggaggcttggtacagcctggggggtccctgagactctcctgtgcagcctctggattcacgtttagctactatgccatgagctgggtccgtcaggctccagggaaggggctggactgggtctcaactattagtggtggtggtggtaacacacactacgcagactccgtgaagggccgattcactatatccagagacaattccaagaacacgctgtatctgcacatgaacagcctgagagccgaagacacggccgtctattactgtgcgaaggatcggatgaaacagctcgtccgggcctactactttgactactggggccagggaaccctggtcaccgtctcctcag

SEQ ID NO: 266 - protein, 453 aa, Homo Sapiens
EVPLVESGGGLVQPGGSLRLSCAASGFTFSYYAMSWVRQAPGKGLDWVSTISGGGGNTHYADSVKGRFTISRDNSKNTLYLHMNSLRAEDTAVYYCAKDRMKQLVRAYYFDYWGQGTLVTVSSASTKGPSVFPLAPSSKSTSGGTAALGCLVKDYFPEPVTVSWNSGALTSGVHTFPAVLQSSGLYSLSSVVTVPSSSLGTQTYICNVNHKPSNTKVDKKVEPKSCDKTHTCPPCPAPELLGGPSVFLFPPKPKDTLMISRTPEVTCVVVDVSHEDPEVKFNWYVDGVEVHNAKTKPREEQYNSTYRVVSVLTVLHQDWLNGKEYKCKVSNKALPAPIEKTISKAKGQPREPQVYTLPPSRDELTKNQVSLTCLVKGFYPSDIAVEWESNGQPENNYKTTPPVLDSDGSFFLYSKLTVDKSRWQQGNVFSCSVMHEALHNHYTQKSLSLSPGK

SEQ ID NO: 267 - DNA, 1359 bp, Homo Sapiens
gaggtgccgctggtggagtctgggggaggcttggtacagcctggggggtccctgagactctcctgtgcagcctctggattcacgtttagctactatgccatgagctgggtccgtcaggctccagggaaggggctggactgggtctcaactattagtggtggtggtggtaacacacactacgcagactccgtgaagggccgattcactatatccagagacaattccaagaacacgctgtatctgcacatgaacagcctgagagccgaagacacggccgtctattactgtgcgaaggatcggatgaaacagctcgtccgggcctactactttgactactggggccagggaaccctggtcaccgtctcctcagccagcaccaagggcccctctgtgttccctctggccccttccagcaagtccacctctggcggaacagccgctctgggctgcctcgtgaaggactacttccccgagcctgtgaccgtgtcctggaactctggcgctctgaccagcggagtgcacaccttccctgctgtgctgcagtcctccggcctgtactccctgtcctccgtcgtgaccgtgccttccagctctctgggcacccagacctacatctgcaacgtgaaccacaagccctccaacaccaaggtggacaagaaggtggaacccaagtcctgcgacaagacccacacctgtcccccttgtcctgcccctgaactgctgggcggaccttccgtgttcctgttccccccaaagcccaaggacaccctgatgatctcccggacccccgaagtgacctgcgtggtggtggatgtgtcccacgaggaccctgaagtgaagttcaattggtacgtggacggcgtggaagtgcacaacgccaagaccaagcctagagaggaacagtacaactccacctaccgggtggtgtccgtgctgaccgtgctgcaccaggattggctgaacggcaaagagtacaagtgcaaggtgtccaacaaggccctgcctgcccccatcgaaaagaccatctccaaggccaagggccagccccgggaaccccaggtgtacacactgccccctagcagggacgagctgaccaagaaccaggtgtccctgacctgtctcgtgaaaggcttctacccctccgatatcgccgtggaatgggagtccaacggccagcctgagaacaactacaagaccaccccccctgtgctggactccgacggctcattcttcctgtacagcaagctgacagtggacaagtcccggtggcagcagggcaacgtgttctcctgctccgtgatgcacgaggccctgcacaaccactacacccagaagtccctgtccctgagccccggcaag

SEQ ID NO: 268 - protein, 6 aa, Homo Sapiens
QDISTY

SEQ ID NO: 269 - protein, 3 aa, Homo Sapiens
GTS

SEQ ID NO: 270 - protein, 9 aa, Homo Sapiens
QQLHTDPIT

SEQ ID NO: 271 - protein, 11 aa, Homo Sapiens
WASQDISTYLG

SEQ ID NO: 272 - protein, 7 aa, Homo Sapiens
GTSSLQS

SEQ ID NO: 273 - protein, 9 aa, Homo Sapiens
QQLHTDPIT

SEQ ID NO: 274 - protein, 107 aa, Homo Sapiens
DIQLTQSPSFLSASVGDRVTITCWASQDISTYLGWYQQKPGKAPKLLIYGTSSLQSGVPSRFSGSGSGTEFTLTISSLQPEDFATYYCQQLHTDPITFGQGTRLEIK

SEQ ID NO: 275 - DNA, 322 bp, Homo Sapiens
gacatccagttgacccagtctccatccttcctgtctgcatctgtaggagacagagtcaccatcacttgctgggccagtcaggacattagcacttatttaggctggtatcagcaaaaaccagggaaagcccctaagctcctgatctatggtacatccagtttgcaaagtggggtcccatcaaggttcagcggcagtggatctgggacagaattcactctcacaatcagcagcctgcagcctgaagattttgcaacttattactgtcaacagcttcatactgacccgatcaccttcggccaagggacacgactggagatcaaac

SEQ ID NO: 276 - protein, 214 aa, Homo Sapiens
DIQLTQSPSFLSASVGDRVTITCWASQDISTYLGWYQQKPGKAPKLLIYGTSSLQSGVPSRFSGSGSGTEFTLTISSLQPEDFATYYCQQLHTDPITFGQGTRLEIKRTVAAPSVFIFPPSDEQLKSGTASVVCLLNNFYPREAKVQWKVDNALQSGNSQESVTEQDSKDSTYSLSSTLTLSKADYEKHKVYACEVTHQGLSSPVTKSFNRGEC

SEQ ID NO: 277 - DNA, 642 bp, Homo Sapiens
gacatccagttgacccagtctccatccttcctgtctgcatctgtaggagacagagtcaccatcacttgctgggccagtcaggacattagcacttatttaggctggtatcagcaaaaaccagggaaagcccctaagctcctgatctatggtacatccagtttgcaaagtggggtcccatcaaggttcagcggcagtggatctgggacagaattcactctcacaatcagcagcctgcagcctgaagattttgcaacttattactgtcaacagcttcatactgacccgatcaccttcggccaagggacacgactggagatcaaacgtacggtggccgctccctccgtgttcatcttcccaccttccgacgagcagctgaagtccggcaccgcttctgtcgtgtgcctgctgaacaacttctacccccgcgaggccaaggtgcagtggaaggtggacaacgccctgcagtccggcaactcccaggaatccgtgaccgagcaggactccaaggacagcacctactccctgtcctccaccctgaccctgtccaaggccgactacgagaagcacaaggtgtacgcctgcgaagtgacccaccagggcctgtctagccccgtgaccaagtctttcaaccggggcgagtgt

SEQ ID NO: 278 - protein, 8 aa, Homo Sapiens
GFTFSSYW

SEQ ID NO: 279 - protein, 8 aa, Homo Sapiens
IKQDGSEK

SEQ ID NO: 280 - protein, 12 aa, Homo Sapiens
ARVRQWSDYSDY

SEQ ID NO: 281 - protein, 5 aa, Homo Sapiens
SYWMN

SEQ ID NO: 282 - protein, 17 aa, Homo Sapiens
NIKQDGSEKYYVDSVKG

SEQ ID NO: 283 - protein, 10 aa, Homo Sapiens
VRQWSDYSDY

SEQ ID NO: 284 - protein, 119 aa, Homo Sapiens
EVHLVESGGGLVQPGGSLRLSCAASGFTFSSYWMNWVRQAPGKGLEWVANIKQDGSEKYYVDSVKGRFTVSRDNAKNSLYLQMNSLRAEDTAVYYCARVRQWSDYSDYWGQGTPVTVSS

SEQ ID NO: 285 - DNA, 358 bp, Homo Sapiens
gaggtgcacctggtggagtctgggggaggcttggtccagcctggggggtccctgagactctcctgtgcagcctctggattcacctttagtagctattggatgaactgggtccgccaggctccagggaaggggctggagtgggtggccaacataaagcaagatggaagtgagaaatactatgtggactctgtgaagggccgcttcaccgtctccagagacaacgccaagaactcactgtatctgcaaatgaacagcctgagagccgaggacacggctgtgtattactgtgcgagagttcgacaatggtccgactactctgactactggggccagggaaccccggtcaccgtctcctcag

SEQ ID NO: 286 - protein, 449 aa, Homo Sapiens
EVHLVESGGGLVQPGGSLRLSCAASGFTFSSYWMNWVRQAPGKGLEWVANIKQDGSEKYYVDSVKGRFTVSRDNAKNSLYLQMNSLRAEDTAVYYCARVRQWSDYSDYWGQGTPVTVSSASTKGPSVFPLAPSSKSTSGGTAALGCLVKDYFPEPVTVSWNSGALTSGVHTFPAVLQSSGLYSLSSVVTVPSSSLGTQTYICNVNHKPSNTKVDKKVEPKSCDKTHTCPPCPAPELLGGPSVFLFPPKPKDTLMISRTPEVTCVVVDVSHEDPEVKFNWYVDGVEVHNAKTKPREEQYNSTYRVVSVLTVLHQDWLNGKEYKCKVSNKALPAPIEKTISKAKGQPREPQVYTLPPSRDELTKNQVSLTCLVKGFYPSDIAVEWESNGQPENNYKTTPPVLDSDGSFFLYSKLTVDKSRWQQGNVFSCSVMHEALHNHYTQKSLSLSPGK

SEQ ID NO: 287 - DNA, 1347 bp, Homo Sapiens
gaggtgcacctggtggagtctgggggaggcttggtccagcctggggggtccctgagactctcctgtgcagcctctggattcacctttagtagctattggatgaactgggtccgccaggctccagggaaggggctggagtgggtggccaacataaagcaagatggaagtgagaaatactatgtggactctgtgaagggccgcttcaccgtctccagagacaacgccaagaactcactgtatctgcaaatgaacagcctgagagccgaggacacggctgtgtattactgtgcgagagttcgacaatggtccgactactctgactactggggccagggaaccccggtcaccgtctcctcagccagcaccaagggcccctctgtgttccctctggccccttccagcaagtccacctctggcggaacagccgctctgggctgcctcgtgaaggactacttccccgagcctgtgaccgtgtcctggaactctggcgctctgaccagcggagtgcacaccttccctgctgtgctgcagtcctccggcctgtactccctgtcctccgtcgtgaccgtgccttccagctctctgggcacccagacctacatctgcaacgtgaaccacaagccctccaacaccaaggtggacaagaaggtggaacccaagtcctgcgacaagacccacacctgtcccccttgtcctgcccctgaactgctgggcggaccttccgtgttcctgttccccccaaagcccaaggacaccctgatgatctcccggacccccgaagtgacctgcgtggtggtggatgtgtcccacgaggaccctgaagtgaagttcaattggtacgtggacggcgtggaagtgcacaacgccaagaccaagcctagagaggaacagtacaactccacctaccgggtggtgtccgtgctgaccgtgctgcaccaggattggctgaacggcaaagagtacaagtgcaaggtgtccaacaaggccctgcctgcccccatcgaaaagaccatctccaaggccaagggccagccccgggaaccccaggtgtacacactgccccctagcagggacgagctgaccaagaaccaggtgtccctgacctgtctcgtgaaaggcttctacccctccgatatcgccgtggaatgggagtccaacggccagcctgagaacaactacaagaccaccccccctgtgctggactccgacggctcattcttcctgtacagcaagctgacagtggacaagtcccggtggcagcagggcaacgtgttctcctgctccgtgatgcacgaggccctgcacaaccactacacccagaagtccctgtccctgagccccggcaag

SEQ ID NO: 288 - protein, 6 aa, Homo Sapiens
QGISSW

SEQ ID NO: 289 - protein, 3 aa, Homo Sapiens
AAS

SEQ ID NO: 290 - protein, 9 aa, Homo Sapiens
QQANSFPFT

SEQ ID NO: 291 - protein, 11 aa, Homo Sapiens
RASQGISSWLA

SEQ ID NO: 292 - protein, 7 aa, Homo Sapiens
AASSLQS

SEQ ID NO: 293 - protein, 9 aa, Homo Sapiens
QQANSFPFT

SEQ ID NO: 294 - protein, 107 aa, Homo Sapiens
DIQMTQSPSSVSASVGDRVTITCRASQGISSWLAWYQQKPGKAPKLLIYAASSLQSGVPSRFSGSGSGTDFTLTISSLQPEDFATYYCQQANSFPFTFGPGTKVDIK

SEQ ID NO: 295 - DNA, 322 bp, Homo Sapiens
gacatccagatgacccagtctccatcttccgtgtctgcatctgtaggagacagagtcaccatcacttgtcgggcgagtcagggtattagcagctggttagcctggtatcagcagaaaccagggaaagcccctaagctcctgatctatgctgcatccagtttgcaaagtggggtcccatcaaggttcagcggcagtggatctgggacagatttcactctcaccatcagcagcctgcagcctgaagattttgcaacttactattgtcaacaggctaacagtttcccattcactttcggccctgggaccaaagtggatatcaaac

SEQ ID NO: 296 - protein, 214 aa, Homo Sapiens
DIQMTQSPSSVSASVGDRVTITCRASQGISSWLAWYQQKPGKAPKLLIYAASSLQSGVPSRFSGSGSGTDFTLTISSLQPEDFATYYCQQANSFPFTFGPGTKVDIKRTVAAPSVFIFPPSDEQLKSGTASVVCLLNNFYPREAKVQWKVDNALQSGNSQESVTEQDSKDSTYSLSSTLTLSKADYEKHKVYACEVTHQGLSSPVTKSFNRGEC

SEQ ID NO: 297 - DNA, 642 bp, Homo Sapiens
gacatccagatgacccagtctccatcttccgtgtctgcatctgtaggagacagagtcaccatcacttgtcgggcgagtcagggtattagcagctggttagcctggtatcagcagaaaccagggaaagcccctaagctcctgatctatgctgcatccagtttgcaaagtggggtcccatcaaggttcagcggcagtggatctgggacagatttcactctcaccatcagcagcctgcagcctgaagattttgcaacttactattgtcaacaggctaacagtttcccattcactttcggccctgggaccaaagtggatatcaaacgtacggtggccgctccctccgtgttcatcttcccaccttccgacgagcagctgaagtccggcaccgcttctgtcgtgtgcctgctgaacaacttctacccccgcgaggccaaggtgcagtggaaggtggacaacgccctgcagtccggcaactcccaggaatccgtgaccgagcaggactccaaggacagcacctactccctgtcctccaccctgaccctgtccaaggccgactacgagaagcacaaggtgtacgcctgcgaagtgacccaccagggcctgtctagccccgtgaccaagtctttcaaccggggcgagtgt

SEQ ID NO: 298 - protein, 214 aa, Homo Sapiens
DIQMTQSPSSLSASVGDRVTITCRASQSISSYLNWYQQKPGKAPKLLIYYASSLQSGVPSRFSGSGSGTDFTLTISSLQPEDFATYYCQQSYSTPITFGQGTRLEIKRTVAAPSVFIFPPSDEQLKSGTASVVCLLNNFYPREAKVQWKVDNALQSGNSQESVTEQDSKDSTYSLSSTLTLSKADYEKHKVYACEVTHQGLSSPVTKSFNRGEC

SEQ ID NO: 299 - protein, 453 aa, Homo Sapiens
EVQLVESGGGLVQPGRSLRLSCAASGFTFDDYAMHWVRQVPGKGLEWVSGISWIRTGIGYADSVKGRFTIFRDNAKNSLYLQMNSLRAEDTALYYCAKDMKGSGTYGGWFDTWGQGTLVTVSSASTKGPSVFPLAPSSKSTSGGTAALGCLVKDYFPEPVTVSWNSGALTSGVHTFPAVLQSSGLYSLSSVVTVPSSSLGTQTYICNVNHKPSNTKVDKKVEPKSCDKTHTCPPCPAPELAGAPSVFLFPPKPKDTLMISRTPEVTCVVVDVSHEDPEVKFNWYVDGVEVHNAKTKPREEQYNSTYRVVSVLTVLHQDWLNGKEYKCKVSNKALPAPIEKTISKAKGQPREPQVYTLPPSRDELTKNQVSLTCLVKGFYPSDIAVEWESNGQPENNYKTTPPVLDSDGSFFLYSKLTVDKSRWQQGNVFSCSVMHEALHNHYTQKSLSLSPGK

SEQ ID NO: 300 - protein, 347 aa, Homo Sapiens
DIQMTQSPSSLSASVGDRVTITCRASQSISSYLNWYQQKPGKAPKLLIYVASSLQSGVPSRFSGSGSGTDFTLTISSLQPEDFATYYCQQSYSTPITFGQGTRLEIKRTVAAPSVFIFPPSDEQLKSGTASVVCLLNNFYPREAKVQWKVDNALQSGNSQESVTEQDSKDSTYSLSSTLTLSKADYEKHKVYACEVTHQGLSSPVTKSFNRGECAPTSSSTKKTQLQLEHLLLDLQMILNGINNYKNPKLTRMLTFKFYMPKKATELKHLQCLEEELKPLEEVLNLAQSKNFHLRPRDLISNINVIVLELKGSETTFMCEYADETATIVEFLNRWITFCQSIISTLT

SEQ ID NO: 301 - protein, 133 aa, Homo Sapiens [sequence omitted]

SEQ ID NO: 302 - protein, 586 aa, Homo Sapiens
EVQLVESGGGLVQPGRSLRLSCAASGFTFDDYAMHWVRQVPGKGLEWVSGISWIRTGIGYADSVKGRFTIFRDNAKNSLYLQMNSLRAEDTALYYCAKDMKGSGTYGGWFDTWGQGTLVTVSSASTKGPSVFPLAPSSKSTSGGTAALGCLVKDYFPEPVTVSWNSGALTSGVHTFPAVLQSSGLYSLSSVVTVPSSSLGTQTYICNVNHKPSNTKVDKKVEPKSCDKTHTCPPCPAPELAGAPSVFLFPPKPKDTLMISRTPEVTCVVVDVSHEDPEVKFNWYVDGVEVHNAKTKPREEQYNSTYRVVSVLTVLHQDWLNGKEYKCKVSNKALPAPIEKTISKAKGQPREPQVYTLPPSRDELTKNQVSLTCLVKGFYPSDIAVEWESNGQPENNYKTTPPVLDSDGSFFLYSKLTVDKSRWQQGNVFSCSVMHEALHNHYTQKSLSLSPGKAPTSSSTKKTQLQLEHLLLDLQMILNGINNYKNPKLTRMLTFKFYMPKKATELKHLQCLEEELKPLEEVLNLAQSKNFHLRPRDLISNINVIVLELKGSETTFMCEYADETATIVEFLNRWITFCQSIISTLT

SEQ ID NO: 303 - protein, 14 aa, Homo Sapiens
APTSTQLQLELLLD

SEQ ID NO: 304 - protein, 11 aa, Homo Sapiens
TQLQLEHLLLD

SEQ ID NO: 305 - protein, 17 aa, Homo Sapiens
APTSKKTQLQLEHLLLD

SEQ ID NO: 306 - protein, 19 aa, Homo Sapiens
PTSSSTKKTQLQLEHLLLD

SEQ ID NO: 307 - protein, 18 aa, Homo Sapiens
TSSSTKKTQLQLEHLLLD

SEQ ID NO: 308 - protein, 17 aa, Homo Sapiens
SSSTKKTQLQLEHLLLD

SEQ ID NO: 309 - protein, 16 aa, Homo Sapiens
SSTKKTQLQLEHLLLD

SEQ ID NO: 310 - protein, 15 aa, Homo Sapiens
STKKTQLQLEHLLLD

SEQ ID NO: 311 - protein, 14 aa, Homo Sapiens
TKKTQLQLEHLLLD

SEQ ID NO: 312 - protein, 13 aa, Homo Sapiens
KKTQLQLEHLLLD

SEQ ID NO: 313 - protein, 12 aa, Homo Sapiens
KTQLQLEHLLLD

SEQ ID NO: 314 - protein, 19 aa, Homo Sapiens
APTSSSTKTQLQLEHLLLD

SEQ ID NO: 315 - protein, 18 aa, Homo Sapiens
APTSSSTTQLQLEHLLLD

SEQ ID NO: 316 - protein, 17 aa, Homo Sapiens
APTSSSTQLQLEHLLLD

SEQ ID NO: 317 - protein, 16 aa, Homo Sapiens
APTSSTQLQLEHLLLD

SEQ ID NO: 318 - protein, 14 aa, Homo Sapiens
APTTQLQLEHLLLD

SEQ ID NO: 319 - protein, 13 aa, Homo Sapiens
APTQLQLEHLLLD

SEQ ID NO: 320 - protein, 12 aa, Homo Sapiens
ATQLQLEHLLLD

SEQ ID NO: 321 - protein, 15 aa, Homo Sapiens
ATKKTQLQLEHLLLD

SEQ ID NO: 322 - protein, 15 aa, Homo Sapiens
APKKTQLQLEHLLLD

SEQ ID NO: 323 - protein, 15 aa, Homo Sapiens
APTKTQLQLEHLLLD

SEQ ID NO: 324 - protein, 113 aa, Homo Sapiens
LQMILNGINNYKNPKLTRMLTFKFYMPKKATELKHLQCLEEELKPLEEVLNLAQSKNFHLRPRDLISNINVIVLELKGSETTFMCEYADETATIVEFLNRWITFCQSIISTLT

SEQ ID NO: 325 - protein, 290 aa, Mus Musculus
MRIFAGIIFTACCHLLRAFTITAPKDLYVVEYGSNVTMECRFPVERELDLLALVVYWEKEDEQVIQFVAGEEDLKPQHSNFRGRASLPKDQLLKGNAALQITDVKLQDAGVYCCIISYGGADYKRITLKVNAPYRKINQRISVDPATSEHELICQAEGYPEAEVIWTNSDHQPVSGKRSVTTSRTEGMLLNVTSSLRVNATANDVFYCTFWRSQPGQNHTAELIIPELPATHPPQNRTHWVLLGSILLFLIVVSTVLLFLRKQVRMLDVEKCGVEDTSSKNRNDTQFEET

SEQ ID NO: 326 - protein, 226 aa, Mus Musculus
FTITAPKDLYVVEYGSNVTMECRFPVERELDLLALVVYWEKEDEQVIQFVAGEEDLKPQHSNFRGRASLPKDQLLKGNAALQITDVKLQDAGVYCCIISYGGADYKRITLKVNAPYRKINQRISVDPATSEHELICQAEGYPEAEVIWTNSDHQPVSGKRSVTTSRTEGMLLNVTSSLRVNATANDVFYCTFWRSQPGQNHTAELIIPELPATHPPQNRTHHHHHH

SEQ ID NO: 327 - protein, 251 aa, Homo Sapiens
ELCDDDPPEIPHATFKAMAYKEGTMLNCECKRGFRRIKSGSLYMLCTGNSSHSSWDNQCQCTSSATRNTTKQVTPQPEEQKERKTTEMQSPMQPVDQASLPGHCREPPPWENEATERIYHFVVGQMVYYQCVQGYRALHRGPAESVCKMTHGKTRWTQPQLICTGEMETSQFPGEEKPQASPEGRPESETSCLVTTTDFQIQTEMAATMETSIFTTEYQVAVAGCVFLLISVLLLSGLTWQRRQRKSRRTI

SEQ ID NO: 328 - protein, 525 aa, Homo Sapiens
AVNGTSQFTCFYNSRANISCVWSQDGALQDTSCQVHAWPDRRRWNQTCELLPVSQASWACNLILGAPDSQKLTTVDIVTLRVLCREGVRWRVMAIQDFKPFENLRLMAPISLQVVHVETHRCNISWEISQASHYFERHLEFEARTLSPGHTWEEAPLLTLKQKQEWICLETLTPDTQYEFQVRVKPLQGEFTTWSPWSQPLAFRTKPAALGKDTIPWLGHLLVGLSGAFGFIILVYLLINCRNTGPWLKKVLKCNTPDPSKFFSQLSSEHGGDVQKWLSSPFPSSSFSPGGLAPEISPLEVLERDKVTQLLLQQDKVPEPASLSSNHSLTSCFTNQGYFFFHLPDALEIEACQVYFTYDPYSEEDPDEGVAGAPTGSSPQPLQPLSGEDDAYCTFPSRDDLLLFSPSLLGGPSPPSTAPGGSGAGEERMPPSLQERVPRDWDPQPLGPPTPGVPDLVDFQPPPELVLREAGEEVPDAGPREGVSFPWSRPPGQGEFRALNARLPLNTDAYLSLQELQGQDPTHLV

SEQ ID NO: 329 - protein, 347 aa, Homo Sapiens
LNTTILTPNGNEDTTADFFLTTMPTDSLSVSTLPLPEVQCFVFNVEYMNCTWNSSSEPQPTNLTLHYWYKNSDNDKVQKCSHYLFSEEITSGCQLQKKEIHLYQTFVVQLQDPREPRRQATQMLKLQNLVIPWAPENLTLHKLSESQLELNWNNRFLNHCLEHLVQYRTDWDHSWTEQSVDYRHKFSLPSVDGQKRYTFRVRSRFNPLCGSAQHWSEWSHPIHWGSNTSKENPFLFALEAVVISVGSMGLIISLLCVYFWLERTMPRIPTLKNLEDLVTEYHGNFSAWSGVSKGLAESLQPDYSERLCLVSEIPPKGGALGEGPGASPCNQHSPYWAPPCYTLKPET

SEQ ID NO: 330 - protein, 152 aa, Homo Sapiens
DCDIEGKDGKQYESVLMVSIDQLLDSMKEIGSNCLNNEFNFFKRHICDANKEGMFLFRAARKLRQFLKMNSTGDFDLHLLKVSEGTTILLNCTGQVKGRKPAALGEAQPTKSLEENKSLKEQKKLNDLCFLKRLLQEIKTCWNKILMGTKEH

SEQ ID NO: 331 - protein, 133 aa, Homo Sapiens
GIHVFILGCFSAGLPKTEANWVNVISDLKKIEDLIQSMHIDATLYTESDVHPSCKVTAMKCFLLELQVISLESGDASIHDTVENLIILANNSLSSNGNVTESGCKECEELEEKNIKEFLQSFVHIVQMFINTS

SEQ ID NO: 332 - protein, 133 aa, Homo Sapiens [sequence omitted]

SEQ ID NO: 333 - protein, 127 aa, Homo Sapiens [sequence omitted]

SEQ ID NO: 334 - protein, 171 aa, Homo Sapiens
CDLPQNHGLLSRNTLVLLHQMRRISPFLCLKDRRDFRFPQEMVKGSQLQKAHVMSVLHEMLQQIFSLFHTERSSAAWNMTLLDQLHTELHQQLQHLETCLLQVVGEGESAGAISSPALTLRRYFQGIRVYLKEKKYSDCAWEVVRMEIMKSLFLSTNMQERLRSKDRDLGS

SEQ ID NO: 335 - protein, 177 aa, Homo Sapiens
GPQREEFPRDLSLISPLAQAVRSSSRTPSDKPVAHVVANPQAEGQLQWLNRRANALLANGVELRDNQLVVPSEGLYLIYSQVLFKGQGCPSTHVLLTHTISRIAVSYQTKVNLLSAIKSPCQRETPEGAEAKPWYEPIYLGGVFQLEKGDRLSAEINRPDYLDFAESGQVYFGIIAL

SEQ ID NO: 336 - protein, 197 aa, Homo Sapiens
RNLPVATPDPGMFPCLHHSQNLLRAVSNMLQKARQTLEFYPCTSEEIDHEDITKDKTSTVEACLPLELTKNESCLNSRETSFITNGSCLASRKTSFMMALCLSSIYEDLKMYQVEFKTMNAKLLMDPKRQIFLDQNMLAVIDELMQALNFNSETVPQKSSLEEPDFYKTKIKLCILLHAFRIRAVTIDRVMSYLNAS

SEQ ID NO: 337 - protein, 306 aa, Homo Sapiens
IWELKKDVYVVELDWYPDAPGEMVVLTCDTPEEDGITWTLDQSSEVLGSGKTLTIQVKEFGDAGQYTCHKGGEVLSHSLLLLHKKEDGIWSTDILKDQKEPKNKTFLRCEAKNYSGRFTCWWLTTISTDLTFSVKSSRGSSDPQGVTCGAATLSAERVRGDNKEYEYSVECQEDSACPAAEESLPIEVMVDAVHKLKYENYTSSFFIRDIIKPDPPKNLQLKPLKNSRQVEVSWEYPDTWSTPHSYFSLTFCVQVQGKSKREKKDRVFTDKTSATVICRKNASISVRAQDRYYSSSWSEWASVPCS

SEQ ID NO: 338 - protein, 103 aa, Homo Sapiens
TPVVRKGRCSCISTNQGTIHLQSLKDLKQFAPSPSCEKIEIIATLKNGVQTCLNPDSADVKELIKKWEKQVSQKKKQKNGKKHQKKKVLKVRKSQRSRQKKTT

SEQ ID NO: 339 - protein, 77 aa, Homo Sapiens
VPLSRTVRCTCISISNQPVNPRSLEKLEIIPASQFCPRVEIIATMKKKGEKRCLNPESKAIKNLLKAVSKERSKRSP

SEQ ID NO: 340 - protein, 330 aa, Homo Sapiens [sequence omitted]

SEQ ID NO: 341 - DNA, 996 bp, Homo Sapiens
gccagcaccaagggcccctctgtgttccctctggccccttccagcaagtccacctctggcggaacagccgctctgggctgcctcgtgaaggactacttccccgagcctgtgaccgtgtcctggaactctggcgctctgaccagcggagtgcacaccttccctgctgtgctgcagtcctccggcctgtactccctgtcctccgtcgtgaccgtgccttccagctctctgggcacccagacctacatctgcaacgtgaaccacaagccctccaacaccaaggtggacaagaaggtggaacccaagtcctgcgacaagacccacacctgtcccccttgtcctgcccctgaactgctgggcggaccttccgtgttcctgttccccccaaagcccaaggacaccctgatgatctcccggacccccgaagtgacctgcgtggtggtggatgtgtcccacgaggaccctgaagtgaagttcaattggtacgtggacggcgtggaagtgcacaacgccaagaccaagcctagagaggaacagtacaactccacctaccgggtggtgtccgtgctgaccgtgctgcaccaggattggctgaacggcaaagagtacaagtgcaaggtgtccaacaaggccctgcctgcccccatcgaaaagaccatctccaaggccaagggccagccccgggaaccccaggtgtacacactgccccctagcagggacgagctgaccaagaaccaggtgtccctgacctgtctcgtgaaaggcttctacccctccgatatcgccgtggaatgggagtccaacggccagcctgagaacaactacaagaccaccccccctgtgctggactccgacggctcattcttcctgtacagcaagctgacagtggacaagtcccggtggcagcagggcaacgtgttctcctgctccgtgatgcacgaggccctgcacaaccactacacccagaagtccctgtccctgagccccggcaagtgatga

SEQ ID NO: 342 - protein, 450 aa, Homo Sapiens
EVQLVESGGGLVQPGRSLRLSCAASGFTFDDYAMHWVRQAPGKGLEWVSGISWIRTGIGYADSVKGRFTISRDNAKNSLYLQMNSLRAEDTALYYCAKDMKGSGTYGGWFDTWGQGTLVTVSSASTKGPSVFPLAPCSRSTSESTAALGCLVKDYFPEPVTVSWNSGALTSGVHTFPAVLQSSGLYSLSSVVTVPSSSLGTKTYTCNVDHKPSNTKVDKRVESKYGPPCPPCPAPELAGAPSVFLFPPKPKDTLMISRTPEVTCVVVDVSQEDPEVQFNWYVDGVEVHNAKTKPREEQFNSTYRVVSVLTVLHQDWLNGKEYKCKVSNKGLPSSIEKTISKAKGQPREPQVYTLPPSQEEMTKNQVSLTCLVKGFYPSDIAVEWESNGQPENNYKTTPPVLDSDGSFFLYSRLTVDKSRWQEGNVFSCSVMHEALHNHYTQKSLSLSLGK

SEQ ID NO: 343 - protein, 8 aa, Homo Sapiens
GFTFSNYA

SEQ ID NO: 344 - protein, 8 aa, Homo Sapiens
ISFSGGTT

SEQ ID NO: 345 - protein, 14 aa, Homo Sapiens
AKDEAPAGATFFDS

SEQ ID NO: 346 - protein, 5 aa, Homo Sapiens
NYAMS

SEQ ID NO: 347 - protein, 17 aa, Homo Sapiens
AISFSGGTTYYADSVKG

SEQ ID NO: 348 - protein, 12 aa, Homo Sapiens
DEAPAGATFFDS

SEQ ID NO: 349 - protein, 121 aa, Homo Sapiens
EVQLAESGGGLVQPGGSLRLSCAASGFTFSNYAMSWVRQTPGKGLEWVSAISFSGGTTYYADSVKGRFTISRDNSKNTLYLHMNSLRADDTAVYYCAKDEAPAGATFFDSWGQGTLVTVSS

SEQ ID NO: 350 - DNA, 364 bp, Homo Sapiens
gaagtgcaactggcggagtctgggggaggcttggtacagccgggggggtccctgagactctcctgtgcagcctctggattcacctttagcaactatgccatgagttgggtccgccagactccaggaaaggggctggagtgggtctcagctattagttttagtggtggtactacatactacgctgactccgtgaagggccggttcaccatctccagagacaattccaagaacacgctgtatttgcacatgaacagcctgagagccgatgacacggccgtatattactgtgcgaaagatgaggcaccagctggcgcaaccttctttgactcctggggccagggaacgctggtcaccgtctcctcag

SEQ ID NO: 351 - protein, 448 aa, Homo Sapiens
EVQLAESGGGLVQPGGSLRLSCAASGFTFSNYAMSWVRQTPGKGLEWVSAISFSGGTTYYADSVKGRFTISRDNSKNTLYLHMNSLRADDTAVYYCAKDEAPAGATFFDSWGQGTLVTVSSASTKGPSVFPLAPCSRSTSESTAALGCLVKDYFPEPVTVSWNSGALTSGVHTFPAVLQSSGLYSLSSVVTVPSSSLGTKTYTCNVDHKPSNTKVDKRVESKYGPPCPPCPAPEFEGGPSVFLFPPKPKDTLMISRTPEVTCVVVDVSQEDPEVQFNWYVDGVEVHNAKTKPREEQFNSTYRVVSVLTVLHQDWLNGKEYKCKVSNKGLPSSIEKTISKAKGQPREPQVYTLPPSQEEMTKNQVSLTCLVKGFYPSDIAVEWESNGQPENNYKTTPPVLDSDGSFFLYSRLTVDKSRWQEGNVFSCSVMHEALHNHYTQKSLSLSLGK

SEQ ID NO: 352 - DNA, 1344 bp, Homo Sapiens
gaagtgcaactggcggagtctgggggaggcttggtacagccgggggggtccctgagactctcctgtgcagcctctggattcacctttagcaactatgccatgagttgggtccgccagactccaggaaaggggctggagtgggtctcagctattagttttagtggtggtactacatactacgctgactccgtgaagggccggttcaccatctccagagacaattccaagaacacgctgtatttgcacatgaacagcctgagagccgatgacacggccgtatattactgtgcgaaagatgaggcaccagctggcgcaaccttctttgactcctggggccagggaacgctggtcaccgtctcctcagccagcaccaagggcccttccgtgttccccctggccccttgcagcaggagcacctccgaatccacagctgccctgggctgtctggtgaaggactactttcccgagcccgtgaccgtgagctggaacagcggcgctctgacatccggcgtccacacctttcctgccgtcctgcagtcctccggcctctactccctgtcctccgtggtgaccgtgcctagctcctccctcggcaccaagacctacacctgtaacgtggaccacaaaccctccaacaccaaggtggacaaacgggtcgagagcaagtacggccctccctgccctccttgtcctgcccccgagttcgaaggcggacccagcgtgttcctgttccctcctaagcccaaggacaccctcatgatcagccggacacccgaggtgacctgcgtggtggtggatgtgagccaggaggaccctgaggtccagttcaactggtatgtggatggcgtggaggtgcacaacgccaagacaaagccccgggaagagcagttcaactccacctacagggtggtcagcgtgctgaccgtgctgcatcaggactggctgaacggcaaggagtacaagtgcaaggtcagcaataagggactgcccagcagcatcgagaagaccatctccaaggctaaaggccagccccgggaacctcaggtgtacaccctgcctcccagccaggaggagatgaccaagaaccaggtgagcctgacctgcctggtgaagggattctacccttccgacatcgccgtggagtgggagtccaacggccagcccgagaacaattataagaccacccctcccgtcctcgacagcgacggatccttctttctgtactccaggctgaccgtggataagtccaggtggcaggaaggcaacgtgttcagctgctccgtgatgcacgaggccctgcacaatcactacacccagaagtccctgagcctgtccctgggaaag

SEQ ID NO: 353 - protein, 6 aa, Homo Sapiens
QGIRRW

SEQ ID NO: 354 - protein, 3 aa, Homo Sapiens
GAS

SEQ ID NO: 355 - protein, 9 aa, Homo Sapiens
QQANSFPIT

SEQ ID NO: 356 - protein, 11 aa, Homo Sapiens
RASQGIRRWLA

SEQ ID NO: 357 - protein, 7 aa, Homo Sapiens
GASSLQS

SEQ ID NO: 358 - protein, 9 aa, Homo Sapiens
QQANSFPIT

SEQ ID NO: 359 - protein, 107 aa, Homo Sapiens
DIQMTQSPSSVSASVGDRVTITCRASQGIRRWLAWYQQKPGKAPKLLISGASSLQSGVPSRFSGSGSGTDFTLIITSLQPEDFATYYCQQANSFPITFGQGTRLEIK

SEQ ID NO: 360 - DNA, 322 bp, Homo Sapiens
gacatccagatgacccagtctccatcttccgtgtctgcatctgtaggagacagagtcaccatcacttgtcgggcgagtcagggtattaggaggtggttagcctggtatcagcagaaaccagggaaagcccctaaactcctgatctctggtgcatccagtttgcaaagtggggtcccatcaaggttcagcggcagtggatctgggacagatttcactctcatcattaccagtctgcagcctgaagattttgcaacttactattgtcaacaggctaacagtttcccgatcaccttcggccaagggacacgactggagatcaaac

SEQ ID NO: 361 - protein, 214 aa, Homo Sapiens
DIQMTQSPSSVSASVGDRVTITCRASQGIRRWLAWYQQKPGKAPKLLISGASSLQSGVPSRFSGSGSGTDFTLIITSLQPEDFATYYCQQANSFPITFGQGTRLEIKRTVAAPSVFIFPPSDEQLKSGTASVVCLLNNFYPREAKVQWKVDNALQSGNSQESVTEQDSKDSTYSLSSTLTLSKADYEKHKVYACEVTHQGLSSPVTKSFNRGEC

SEQ ID NO: 362 - DNA, 642 bp, Homo Sapiens
gacatccagatgacccagtctccatcttccgtgtctgcatctgtaggagacagagtcaccatcacttgtcgggcgagtcagggtattaggaggtggttagcctggtatcagcagaaaccagggaaagcccctaaactcctgatctctggtgcatccagtttgcaaagtggggtcccatcaaggttcagcggcagtggatctgggacagatttcactctcatcattaccagtctgcagcctgaagattttgcaacttactattgtcaacaggctaacagtttcccgatcaccttcggccaagggacacgactggagatcaaacgtacggtggccgctccctccgtgttcatcttcccaccttccgacgagcagctgaagtccggcaccgcttctgtcgtgtgcctgctgaacaacttctacccccgcgaggccaaggtgcagtggaaggtggacaacgccctgcagtccggcaactcccaggaatccgtgaccgagcaggactccaaggacagcacctactccctgtcctccaccctgaccctgtccaaggccgactacgagaagcacaaggtgtacgcctgcgaagtgacccaccagggcctgtctagccccgtgaccaagtctttcaaccggggcgagtgt

SEQ ID NO: 363 - protein, 8 aa, Homo Sapiens
GYTFSTFG

SEQ ID NO: 364 - protein, 8 aa, Homo Sapiens
ISAYNGDT

SEQ ID NO: 365 - protein, 14 aa, Homo Sapiens
ARSSGHYYYYGMDV

SEQ ID NO: 366 - protein, 121 aa, Homo Sapiens
QVQVVQSGAEVKKPGASVKVSCKASGYTFSTFGITWVRQAPGQGLEWMGWISAYNGDTNYAQNLQGRVIMTTDTSTSTAYMELRSLRSDDTAVYYCARSSGHYYYYGMDVWGQGTTVTVSS

SEQ ID NO: 367 - DNA, 363 bp, Homo Sapiens
caggttcaggtggtgcagtctggagctgaggtgaagaagcctggggcctcagtgaaggtctcctgcaaggcttctggttacaccttttccacctttggtatcacctgggtgcgacaggcccctggacaagggcttgaatggatgggatggatcagcgcttacaatggtgacacaaactatgcacagaatctccagggcagagtcatcatgaccacagacacatccacgagcacagcctacatggagctgaggagcctgagatctgacgacacggccgtttattactgtgcgaggagcagtggccactactactactacggtatggacgtctggggccaagggaccacggtcaccgtctcctca

SEQ ID NO: 368 - protein, 451 aa, Homo Sapiens
QVQVVQSGAEVKKPGASVKVSCKASGYTFSTFGITWVRQAPGQGLEWMGWISAYNGDTNYAQNLQGRVIMTTDTSTSTAYMELRSLRSDDTAVYYCARSSGHYYYYGMDVWGQGTTVTVSSASTKGPSVFPLAPSSKSTSGGTAALGCLVKDYFPEPVTVSWNSGALTSGVHTFPAVLQSSGLYSLSSVVTVPSSSLGTQTYICNVNHKPSNTKVDKKVEPKSCDKTHTCPPCPAPELLGGPSVFLFPPKPKDTLMISRTPEVTCVVVDVSHEDPEVKFNWYVDGVEVHNAKTKPREEQYNSTYRVVSVLTVLHQDWLNGKEYKCKVSNKALPAPIEKTISKAKGQPREPQVYTLPPSRDELTKNQVSLTCLVKGFYPSDIAVEWESNGQPENNYKTTPPVLDSDGSFFLYSKLTVDKSRWQQGNVFSCSVMHEALHNHYTQKSLSLSPGK

SEQ ID NO: 369 - DNA, 1359 bp, Homo Sapiens
caggttcaggtggtgcagtctggagctgaggtgaagaagcctggggcctcagtgaaggtctcctgcaaggcttctggttacaccttttccacctttggtatcacctgggtgcgacaggcccctggacaagggcttgaatggatgggatggatcagcgcttacaatggtgacacaaactatgcacagaatctccagggcagagtcatcatgaccacagacacatccacgagcacagcctacatggagctgaggagcctgagatctgacgacacggccgtttattactgtgcgaggagcagtggccactactactactacggtatggacgtctggggccaagggaccacggtcaccgtctcctcagccagcaccaagggcccctctgtgttccctctggccccttccagcaagtccacctctggcggaacagccgctctgggctgcctcgtgaaggactacttccccgagcctgtgaccgtgtcctggaactctggcgctctgaccagcggagtgcacaccttccctgctgtgctgcagtcctccggcctgtactccctgtcctccgtcgtgaccgtgccttccagctctctgggcacccagacctacatctgcaacgtgaaccacaagccctccaacaccaaggtggacaagaaggtggaacccaagtcctgcgacaagacccacacctgtcccccttgtcctgcccctgaactgctgggcggaccttccgtgttcctgttccccccaaagcccaaggacaccctgatgatctcccggacccccgaagtgacctgcgtggtggtggatgtgtcccacgaggaccctgaagtgaagttcaattggtacgtggacggcgtggaagtgcacaacgccaagaccaagcctagagaggaacagtacaactccacctaccgggtggtgtccgtgctgaccgtgctgcaccaggattggctgaacggcaaagagtacaagtgcaaggtgtccaacaaggccctgcctgcccccatcgaaaagaccatctccaaggccaagggccagccccgggaaccccaggtgtacacactgccccctagcagggacgagctgaccaagaaccaggtgtccctgacctgtctcgtgaaaggcttctacccctccgatatcgccgtggaatgggagtccaacggccagcctgagaacaactacaagaccaccccccctgtgctggactccgacggctcattcttcctgtacagcaagctgacagtggacaagtcccggtggcagcagggcaacgtgttctcctgctccgtgatgcacgaggccctgcacaaccactacacccagaagtccctgtccctgagccccggcaagtgatga

SEQ ID NO: 370 - protein, 11 aa, Homo Sapiens
QSLLHSNEYNY

SEQ ID NO: 371 - protein, 3 aa, Homo Sapiens
LGS

SEQ ID NO: 372 - protein, 9 aa, Homo Sapiens
MQSLQTPLT

SEQ ID NO: 373 - protein, 112 aa, Homo Sapiens
DIVMTQSPLSLPVTPGEPASISCRSSQSLLHSNEYNYLDWYLQKPGQSPQLLIFLGSNRASGVPDRFSGSGSGTDFTLKITRVEAEDVGIYYCMQSLQTPLTFGGGTKVEIK

SEQ ID NO: 374 - DNA, 336 bp, Homo Sapiens
gatattgtgatgactcagtctccactctccctgcccgtcacccctggagagccggcctccatctcctgcaggtctagtcagagcctcctgcatagtaatgaatacaactatttggattggtacctgcagaagccagggcagtctccacagctcctgatctttttgggttctaatcgggcctccggggtccctgacaggttcagtggcagtggatcaggcacagattttacactgaaaatcaccagagtggaggctgaggatgttggaatttattactgcatgcaatctctacaaactccgctcactttcggcggagggaccaaggtggagatcaaa

SEQ ID NO: 375 - protein, 219 aa, Homo Sapiens
DIVMTQSPLSLPVTPGEPASISCRSSQSLLHSNEYNYLDWYLQKPGQSPQLLIFLGSNRASGVPDRFSGSGSGTDFTLKITRVEAEDVGIYYCMQSLQTPLTFGGGTKVEIKRTVAAPSVFIFPPSDEQLKSGTASVVCLLNNFYPREAKVQWKVDNALQSGNSQESVTEQDSKDSTYSLSSTLTLSKADYEKHKVYACEVTHQGLSSPVTKSFNRGEC

SEQ ID NO: 376 - DNA, 657 bp, Homo Sapiens
gatattgtgatgactcagtctccactctccctgcccgtcacccctggagagccggcctccatctcctgcaggtctagtcagagcctcctgcatagtaatgaatacaactatttggattggtacctgcagaagccagggcagtctccacagctcctgatctttttgggttctaatcgggcctccggggtccctgacaggttcagtggcagtggatcaggcacagattttacactgaaaatcaccagagtggaggctgaggatgttggaatttattactgcatgcaatctctacaaactccgctcactttcggcggagggaccaaggtggagatcaaacgtacggtggccgctccctccgtgttcatcttcccaccttccgacgagcagctgaagtccggcaccgcttctgtcgtgtgcctgctgaacaacttctacccccgcgaggccaaggtgcagtggaaggtggacaacgccctgcagtccggcaactcccaggaatccgtgaccgagcaggactccaaggacagcacctactccctgtcctccaccctgaccctgtccaaggccgactacgagaagcacaaggtgtacgcctgcgaagtgacccaccagggcctgtctagccccgtgaccaagtctttcaaccggggcgagtgt

SEQ ID NO: 377 - protein, 8 aa, Homo Sapiens
GYTFTSYG

SEQ ID NO: 378 - protein, 8 aa, Homo Sapiens
ISAYNGNT

SEQ ID NO: 379 - protein, 17 aa, Homo Sapiens
ARSTYFYGSGTLYGMDV

SEQ ID NO: 380 - protein, 124 aa, Homo Sapiens
QVQLVQSGGEVKKPGASVKVSCKASGYTFTSYGFSWVRQAPGQGLEWMGWISAYNGNTNYAQKLQGRVTMTTDTSTSTAYMELRSLRSDDTAVYYCARSTYFYGSGTLYGMDVWGQGTTVTVSS

SEQ ID NO: 381 - DNA, 372 bp, Homo Sapiens
caggttcaactggtgcagtctggaggtgaggtgaagaagcctggggcctcagtgaaggtctcctgcaaggcttctggttacacctttaccagctatggtttcagctgggtgcgacaggcccctggacaaggactagagtggatgggatggatcagcgcttacaatggtaacacaaactatgcacagaagctccagggcagagtcaccatgaccacagacacatccacgagcacagcctacatggagctgaggagcttgagatctgacgacacggccgtgtattactgtgcgagatctacgtatttctatggttcggggaccctctacggtatggacgtctggggccaagggaccacggtcaccgtctcctca

SEQ ID NO: 382 - protein, 454 aa, Homo Sapiens
QVQLVQSGGEVKKPGASVKVSCKASGYTFTSYGFSWVRQAPGQGLEWMGWISAYNGNTNYAQKLQGRVTMTTDTSTSTAYMELRSLRSDDTAVYYCARSTYFYGSGTLYGMDVWGQGTTVTVSSASTKGPSVFPLAPSSKSTSGGTAALGCLVKDYFPEPVTVSWNSGALTSGVHTFPAVLQSSGLYSLSSVVTVPSSSLGTQTYICNVNHKPSNTKVDKKVEPKSCDKTHTCPPCPAPELLGGPSVFLFPPKPKDTLMISRTPEVTCVVVDVSHEDPEVKFNWYVDGVEVHNAKTKPREEQYNSTYRVVSVLTVLHQDWLNGKEYKCKVSNKALPAPIEKTISKAKGQPREPQVYTLPPSRDELTKNQVSLTCLVKGFYPSDIAVEWESNGQPENNYKTTPPVLDSDGSFFLYSKLTVDKSRWQQGNVFSCSVMHEALHNHYTQKSLSLSPGK

SEQ ID NO: 383 - DNA, 1368 bp, Homo Sapiens
caggttcaactggtgcagtctggaggtgaggtgaagaagcctggggcctcagtgaaggtctcctgcaaggcttctggttacacctttaccagctatggtttcagctgggtgcgacaggcccctggacaaggactagagtggatgggatggatcagcgcttacaatggtaacacaaactatgcacagaagctccagggcagagtcaccatgaccacagacacatccacgagcacagcctacatggagctgaggagcttgagatctgacgacacggccgtgtattactgtgcgagatctacgtatttctatggttcggggaccctctacggtatggacgtctggggccaagggaccacggtcaccgtctcctcagccagcaccaagggcccctctgtgttccctctggccccttccagcaagtccacctctggcggaacagccgctctgggctgcctcgtgaaggactacttccccgagcctgtgaccgtgtcctggaactctggcgctctgaccagcggagtgcacaccttccctgctgtgctgcagtcctccggcctgtactccctgtcctccgtcgtgaccgtgccttccagctctctgggcacccagacctacatctgcaacgtgaaccacaagccctccaacaccaaggtggacaagaaggtggaacccaagtcctgcgacaagacccacacctgtcccccttgtcctgcccctgaactgctgggcggaccttccgtgttcctgttccccccaaagcccaaggacaccctgatgatctcccggacccccgaagtgacctgcgtggtggtggatgtgtcccacgaggaccctgaagtgaagttcaattggtacgtggacggcgtggaagtgcacaacgccaagaccaagcctagagaggaacagtacaactccacctaccgggtggtgtccgtgctgaccgtgctgcaccaggattggctgaacggcaaagagtacaagtgcaaggtgtccaacaaggccctgcctgcccccatcgaaaagaccatctccaaggccaagggccagccccgggaaccccaggtgtacacactgccccctagcagggacgagctgaccaagaaccaggtgtccctgacctgtctcgtgaaaggcttctacccctccgatatcgccgtggaatgggagtccaacggccagcctgagaacaactacaagaccaccccccctgtgctggactccgacggctcattcttcctgtacagcaagctgacagtggacaagtcccggtggcagcagggcaacgtgttctcctgctccgtgatgcacgaggccctgcacaaccactacacccagaagtccctgtccctgagccccggcaagtgatga

SEQ ID NO: 384 - protein, 11 aa, Homo Sapiens
QSLLHSDGYNY

SEQ ID NO: 385 - protein, 3 aa, Homo Sapiens
LGS

SEQ ID NO: 386 - protein, 9 aa, Homo Sapiens
MQALQTPLS

SEQ ID NO: 387 - protein, 112 aa, Homo Sapiens
DIVMTQSPLSLPVTPGEPASISCRSSQSLLHSDGYNYLDWYLQKPGQSPQLLIYLGSTRASGFPDRFSGSGSGTDFTLKISRVEAEDVGVYYCMQALQTPLSFGQGTKLEIK

SEQ ID NO: 388 - DNA, 336 bp, Homo Sapiens
gatattgtgatgactcagtctccactctccctgcccgtcacccctggagagccggcctccatctcctgcaggtctagtcagagcctcctgcatagtgatggatacaactgtttggattggtacctgcagaagccagggcagtctccacagctcctgatctatttgggttctactcgggcctccgggttccctgacaggttcagtggcagtggatcaggcacagattttacactgaaaatcagcagagtggaggctgaggatgttggggtttattactgcatgcaagctctacaaactccgtgcagttttggccaggggaccaagctggagatcaaa

SEQ ID NO: 389 - protein, 219 aa, Homo Sapiens
DIVMTQSPLSLPVTPGEPASISCRSSQSLLHSDGYNYLDWYLQKPGQSPQLLIYLGSTRASGFPDRFSGSGSGTDFTLKISRVEAEDVGVYYCMQALQTPLSFGQGTKLEIKRTVAAPSVFIFPPSDEQLKSGTASVVCLLNNFYPREAKVQWKVDNALQSGNSQESVTEQDSKDSTYSLSSTLTLSKADYEKHKVYACEVTHQGLSSPVTKSFNRGEC

SEQ ID NO: 390 - DNA, 657 bp, Homo Sapiens
gatattgtgatgactcagtctccactctccctgcccgtcacccctggagagccggcctccatctcctgcaggtctagtcagagcctcctgcatagtgatggatacaactgtttggattggtacctgcagaagccagggcagtctccacagctcctgatctatttgggttctactcgggcctccgggttccctgacaggttcagtggcagtggatcaggcacagattttacactgaaaatcagcagagtggaggctgaggatgttggggtttattactgcatgcaagctctacaaactccgtgcagttttggccaggggaccaagctggagatcaaacgtacggtggccgctccctccgtgttcatcttcccaccttccgacgagcagctgaagtccggcaccgcttctgtcgtgtgcctgctgaacaacttctacccccgcgaggccaaggtgcagtggaaggtggacaacgccctgcagtccggcaactcccaggaatccgtgaccgagcaggactccaaggacagcacctactccctgtcctccaccctgaccctgtccaaggccgactacgagaagcacaaggtgtacgcctgcgaagtgacccaccagggcctgtctagccccgtgaccaagtctttcaaccggggcgagtgt

SEQ ID NO: 391 - protein, 8 aa, Homo Sapiens
GYTFTSYG

SEQ ID NO: 392 - protein, 8 aa, Homo Sapiens
ISAYNGNT

SEQ ID NO: 393 - protein, 17 aa, Homo Sapiens
ARSTYFYGSGTLYGMDV

SEQ ID NO: 394 - protein, 124 aa, Homo Sapiens; identical to SEQ ID NO: 380

SEQ ID NO: 395 - DNA, 372 bp, Homo Sapiens; identical to SEQ ID NO: 381

SEQ ID NO: 396 - protein, 454 aa, Homo Sapiens; identical to SEQ ID NO: 382

SEQ ID NO: 397 - DNA, 1368 bp, Homo Sapiens; identical to SEQ ID NO: 383

SEQ ID NO: 398 - protein, 11 aa, Homo Sapiens
QSLLHSDGYNC

SEQ ID NO: 399 - protein, 3 aa, Homo Sapiens
LGS

SEQ ID NO: 400 - protein, 9 aa, Homo Sapiens
MQALQTPCS

SEQ ID NO: 401 - protein, 112 aa, Homo Sapiens
DIVMTQSPLSLPVTPGEPASISCRSSQSLLHSDGYNCLDWYLQKPGQSPQLLIYLGSTRASGFPDRFSGSGSGTDFTLKISRVEAEDVGVYYCMQALQTPCSFGQGTKLEIK

SEQ ID NO: 402 - DNA, 336 bp, Homo Sapiens; identical to SEQ ID NO: 388

SEQ ID NO: 403 - protein, 219 aa, Homo Sapiens
DIVMTQSPLSLPVTPGEPASISCRSSQSLLHSDGYNCLDWYLQKPGQSPQLLIYLGSTRASGFPDRFSGSGSGTDFTLKISRVEAEDVGVYYCMQALQTPCSFGQGTKLEIKRTVAAPSVFIFPPSDEQLKSGTASVVCLLNNFYPREAKVQWKVDNALQSGNSQESVTEQDSKDSTYSLSSTLTLSKADYEKHKVYACEVTHQGLSSPVTKSFNRGEC

SEQ ID NO: 404 - DNA, 657 bp, Homo Sapiens; identical to SEQ ID NO: 390

SEQ ID NO: 405 - protein, 8 aa, Homo Sapiens
GVTFDDYG

SEQ ID NO: 406 - protein, 8 aa, Homo Sapiens
INWNGGDT

SEQ ID NO: 407 - protein, 17 aa, Homo Sapiens
ARDFYGSGSYYHVPFDY

SEQ ID NO: 408 - protein, 124 aa, Homo Sapiens
EVQLVESGGGVVRPGGSLRLSCVASGVTFDDYGMSWVRQAPGKGLEWVSGINWNGGDTDYSDSVKGRFTISRDNAKNSLYLQMNSLRAEDTALYYCARDFYGSGSYYHVPFDYWGQGILVTVSS

SEQ ID NO: 409 - DNA, 372 bp, Homo Sapiens
gaggtgcagctggtggagtctgggggaggtgtggtacggcctggggggtccctgagactctcctgtgtagcctctggagtcacctttgatgattatggcatgagctgggtccgccaagctccagggaaggggctggartgggtctctggtattaattggaatggtggcgacacagattattcagactctgtgaagggccgattcaccatctccagagacaacgccaagaactccctgtatctacaaatgaatagtctgagagccgaggacacggccttgtattactgtgcgagggatttctatggttcggggagttattatcacgttccttttgactactggggccagggaatcctggtcaccgtctcctca

SEQ ID NO: 410 - protein, 454 aa, Homo Sapiens
EVQLVESGGGVVRPGGSLRLSCVASGVTFDDYGMSWVRQAPGKGLEWVSGINWNGGDTDYSDSVKGRFTISRDNAKNSLYLQMNSLRAEDTALYYCARDFYGSGSYYHVPFDYWGQGILVTVSSASTKGPSVFPLAPSSKSTSGGTAALGCLVKDYFPEPVTVSWNSGALTSGVHTFPAVLQSSGLYSLSSVVTVPSSSLGTQTYICNVNHKPSNTKVDKKVEPKSCDKTHTCPPCPAPELLGGPSVFLFPPKPKDTLMISRTPEVTCVVVDVSHEDPEVKFNWYVDGVEVHNAKTKPREEQYNSTYRVVSVLTVLHQDWLNGKEYKCKVSNKALPAPIEKTISKAKGQPREPQVYTLPPSRDELTKNQVSLTCLVKGFYPSDIAVEWESNGQPENNYKTTPPVLDSDGSFFLYSKLTVDKSRWQQGNVFSCSVMHEALHNHYTQKSLSLSPGK

SEQ ID NO: 411 - DNA, 1368 bp, Homo Sapiens
gaggtgcagctggtggagtctgggggaggtgtggtacggcctggggggtccctgagactctcctgtgtagcctctggagtcacctttgatgattatggcatgagctgggtccgccaagctccagggaaggggctggartgggtctctggtattaattggaatggtggcgacacagattattcagactctgtgaagggccgattcaccatctccagagacaacgccaagaactccctgtatctacaaatgaatagtctgagagccgaggacacggccttgtattactgtgcgagggatttctatggttcggggagttattatcacgttccttttgactactggggccagggaatcctggtcaccgtctcctcagccagcaccaagggcccctctgtgttccctctggccccttccagcaagtccacctctggcggaacagccgctctgggctgcctcgtgaaggactacttccccgagcctgtgaccgtgtcctggaactctggcgctctgaccagcggagtgcacaccttccctgctgtgctgcagtcctccggcctgtactccctgtcctccgtcgtgaccgtgccttccagctctctgggcacccagacctacatctgcaacgtgaaccacaagccctccaacaccaaggtggacaagaaggtggaacccaagtcctgcgacaagacccacacctgtcccccttgtcctgcccctgaactgctgggcggaccttccgtgttcctgttccccccaaagcccaaggacaccctgatgatctcccggacccccgaagtgacctgcgtggtggtggatgtgtcccacgaggaccctgaagtgaagttcaattggtacgtggacggcgtggaagtgcacaacgccaagaccaagcctagagaggaacagtacaactccacctaccgggtggtgtccgtgctgaccgtgctgcaccaggattggctgaacggcaaagagtacaagtgcaaggtgtccaacaaggccctgcctgcccccatcgaaaagaccatctccaaggccaagggccagccccgggaaccccaggtgtacacactgccccctagcagggacgagctgaccaagaaccaggtgtccctgacctgtctcgtgaaaggcttctacccctccgatatcgccgtggaatgggagtccaacggccagcctgagaacaactacaagaccaccccccctgtgctggactccgacggctcattcttcctgtacagcaagctgacagtggacaagtcccggtggcagcagggcaacgtgttctcctgctccgtgatgcacgaggccctgcacaaccactacacccagaagtccctgtccctgagccccggcaagtgatga

SEQ ID NO: 412 - protein, 7 aa, Homo Sapiens
QSVSRSY

SEQ ID NO: 413 - protein, 3 aa, Homo Sapiens
GAS

SEQ ID NO: 414 - protein, 9 aa, Homo Sapiens
HQYDMSPFT

SEQ ID NO: 415 - protein, 108 aa, Homo Sapiens
EIVLTQSPGTLSLSPGERATLSCRASQSVSRSYLAWYQQKRGQAPRLLIYGASSRATGIPDRFSGDGSGTDFTLSISRLEPEDFAVYYCHQYDMSPFTFGPGTKVDIK

SEQ ID NO: 416 - DNA, 324 bp, Homo Sapiens
gaaattgtgttgacgcagtctccagggaccctgtctttgtctccaggggaaagagccaccctctcctgcagggccagtcagagtgttagcagaagctacttagcctggtaccagcagaaacgtggccaggctcccaggctcctcatctatggtgcatccagcagggccactggcatcccagacaggttcagtggcgatgggtctgggacagacttcactctctccatcagcagactggagcctgaagattttgcagtgtattactgtcaccagtatgatatgtcaccattcactttcggccctgggaccaaagtggatatcaaa

SEQ ID NO: 417 - protein, 215 aa, Homo Sapiens
EIVLTQSPGTLSLSPGERATLSCRASQSVSRSYLAWYQQKRGQAPRLLIYGASSRATGIPDRFSGDGSGTDFTLSISRLEPEDFAVYYCHQYDMSPFTFGPGTKVDIKRTVAAPSVFIFPPSDEQLKSGTASVVCLLNNFYPREAKVQWKVDNALQSGNSQESVTEQDSKDSTYSLSSTLTLSKADYEKHKVYACEVTHQGLSSPVTKSFNRGEC

SEQ ID NO: 418 - DNA, 645 bp, Homo Sapiens
gaaattgtgttgacgcagtctccagggaccctgtctttgtctccaggggaaagagccaccctctcctgcagggccagtcagagtgttagcagaagctacttagcctggtaccagcagaaacgtggccaggctcccaggctcctcatctatggtgcatccagcagggccactggcatcccagacaggttcagtggcgatgggtctgggacagacttcactctctccatcagcagactggagcctgaagattttgcagtgtattactgtcaccagtatgatatgtcaccattcactttcggccctgggaccaaagtggatatcaaacgtacggtggccgctccctccgtgttcatcttcccaccttccgacgagcagctgaagtccggcaccgcttctgtcgtgtgcctgctgaacaacttctacccccgcgaggccaaggtgcagtggaaggtggacaacgccctgcagtccggcaactcccaggaatccgtgaccgagcaggactccaaggacagcacctactccctgtcctccaccctgaccctgtccaaggccgactacgagaagcacaaggtgtacgcctgcgaagtgacccaccagggcctgtctagccccgtgaccaagtctttcaaccggggcgagtgt

SEQ ID NO: 419 - protein, 8 aa, Homo Sapiens
GLTFDDYG

SEQ ID NO: 420 - protein, 8 aa, Homo Sapiens
INWNGDNT

SEQ ID NO: 421 - protein, 17 aa, Homo Sapiens
ARDYYGSGSYYNVPFDY

SEQ ID NO: 422 - protein, 124 aa, Homo Sapiens
EVQLVESGGGVVRPGGSLRLSCAASGLTFDDYGMSWVRQVPGKGLEWVSGINWNGDNTDYADSVKGRFTISRDNAKNSLYLQMNSLRAEDTALYYCARDYYGSGSYYNVPFDYWGQGTLVTVSS

SEQ ID NO: 423 - DNA, 372 bp, Homo Sapiens
gaggtgcagctggtggagtctgggggaggtgtggtacggcctggggggtccctgagactctcctgtgcagcctctggactcacctttgatgattatggcatgagctgggtccgccaagttccagggaaggggctggagtgggtctctggtattaattggaatggtgataacacagattatgcagactctgtgaagggccgattcaccatctccagagacaacgccaagaactccctgtatctgcaaatgaacagtctgagagccgaggacacggccttgtattactgtgcgagggattactatggttcggggagttattataacgttccttttgactactggggccagggaaccctggtcaccgtctcctca

SEQ ID NO: 424 - protein, 454 aa, Homo Sapiens
EVQLVESGGGVVRPGGSLRLSCAASGLTFDDYGMSWVRQVPGKGLEWVSGINWNGDNTDYADSVKGRFTISRDNAKNSLYLQMNSLRAEDTALYYCARDYYGSGSYYNVPFDYWGQGTLVTVSSASTKGPSVFPLAPSSKSTSGGTAALGCLVKDYFPEPVTVSWNSGALTSGVHTFPAVLQSSGLYSLSSVVTVPSSSLGTQTYICNVNHKPSNTKVDKKVEPKSCDKTHTCPPCPAPELLGGPSVFLFPPKPKDTLMISRTPEVTCVVVDVSHEDPEVKFNWYVDGVEVHNAKTKPREEQYNSTYRVVSVLTVLHQDWLNGKEYKCKVSNKALPAPIEKTISKAKGQPREPQVYTLPPSRDELTKNQVSLTCLVKGFYPSDIAVEWESNGQPENNYKTTPPVLDSDGSFFLYSKLTVDKSRWQQGNVFSCSVMHEALHNHYTQKSLSLSPGK

SEQ ID NO: 425 - DNA, 1368 bp, Homo Sapiens
gaggtgcagctggtggagtctgggggaggtgtggtacggcctggggggtccctgagactctcctgtgcagcctctggactcacctttgatgattatggcatgagctgggtccgccaagttccagggaaggggctggagtgggtctctggtattaattggaatggtgataacacagattatgcagactctgtgaagggccgattcaccatctccagagacaacgccaagaactccctgtatctgcaaatgaacagtctgagagccgaggacacggccttgtattactgtgcgagggattactatggttcggggagttattataacgttccttttgactactggggccagggaaccctggtcaccgtctcctcagccagcaccaagggcccctctgtgttccctctggccccttccagcaagtccacctctggcggaacagccgctctgggctgcctcgtgaaggactacttccccgagcctgtgaccgtgtcctggaactctggcgctctgaccagcggagtgcacaccttccctgctgtgctgcagtcctccggcctgtactccctgtcctccgtcgtgaccgtgccttccagctctctgggcacccagacctacatctgcaacgtgaaccacaagccctccaacaccaaggtggacaagaaggtggaacccaagtcctgcgacaagacccacacctgtcccccttgtcctgcccctgaactgctgggcggaccttccgtgttcctgttccccccaaagcccaaggacaccctgatgatctcccggacccccgaagtgacctgcgtggtggtggatgtgtcccacgaggaccctgaagtgaagttcaattggtacgtggacggcgtggaagtgcacaacgccaagaccaagcctagagaggaacagtacaactccacctaccgggtggtgtccgtgctgaccgtgctgcaccaggattggctgaacggcaaagagtacaagtgcaaggtgtccaacaaggccctgcctgcccccatcgaaaagaccatctccaaggccaagggccagccccgggaaccccaggtgtacacactgccccctagcagggacgagctgaccaagaaccaggtgtccctgacctgtctcgtgaaaggcttctacccctccgatatcgccgtggaatgggagtccaacggccagcctgagaacaactacaagaccaccccccctgtgctggactccgacggctcattcttcctgtacagcaagctgacagtggacaagtcccggtggcagcagggcaacgtgttctcctgctccgtgatgcacgaggccctgcacaaccactacacccagaagtccctgtccctgagccccggcaagtgatga

SEQ ID NO: 426 - protein, 7 aa, Homo Sapiens
QSVSSSY

SEQ ID NO: 427 - protein, 3 aa, Homo Sapiens
GAS

SEQ ID NO: 428 - protein, 8 aa, Homo Sapiens
QQYGSSPF

SEQ ID NO: 429 - protein, 107 aa, Homo Sapiens
EIVLTQSPGTLSLSPGERATLSCRASQSVSSSYLAWYQQKPGQAPRLLIYGASSRATGIPDRFSGSGSGTDFTLTIRRLEPEDFAVYYCQQYGSSPFFGPGTKVDIK

SEQ ID NO: 430 - DNA, 321 bp, Homo Sapiens
gaaattgtgttgacgcagtctccaggcaccctgtctttgtctccaggggaaagagccaccctctcctgcagggccagtcagagtgttagcagcagctacttagcctggtaccagcagaaacctggccaggctcccaggctcctcatatatggtgcatccagcagggccactggcatcccagacaggttcagtggcagtgggtctgggacagacttcactctcaccatcagaagactggagcctgaagattttgcagtgtattactgtcagcagtatggtagttcaccattcttcggccctgggaccaaagtggatatcaaa

SEQ ID NO: 431 - DNA, 323 bp, Homo Sapiens
gaaattgtgttgacgcagtctccaggcaccctgtctttgtctccaggggaaagagccaccctctcctgcagggccagtcagagtgttagcagcagctacttagcctggtaccagcagaaacctggccaggctcccaggctcctcatatatggtgcatccagcagggccactggcatcccagacaggttcagtggcagtgggtctgggacagacttcactctcaccatcagaagactggagcctgaagattttgcagtgtattactgtcagcagtatggtagttcaccattcacttcggccctgggaccaaagtggatatcaaa

SEQ ID NO: 432 - protein, 214 aa, Homo Sapiens
EIVLTQSPGTLSLSPGERATLSCRASQSVSSSYLAWYQQKPGQAPRLLIYGASSRATGIPDRFSGSGSGTDFTLTIRRLEPEDFAVYYCQQYGSSPFFGPGTKVDIKRTVAAPSVFIFPPSDEQLKSGTASVVCLLNNFYPREAKVQWKVDNALQSGNSQESVTEQDSKDSTYSLSSTLTLSKADYEKHKVYACEVTHQGLSSPVTKSFNRGEC

SEQ ID NO: 433 - DNA, 642 bp, Homo Sapiens
gaaattgtgttgacgcagtctccaggcaccctgtctttgtctccaggggaaagagccaccctctcctgcagggccagtcagagtgttagcagcagctacttagcctggtaccagcagaaacctggccaggctcccaggctcctcatatatggtgcatccagcagggccactggcatcccagacaggttcagtggcagtgggtctgggacagacttcactctcaccatcagaagactggagcctgaagattttgcagtgtattactgtcagcagtatggtagttcaccattcttcggccctgggaccaaagtggatatcaaacgtacggtggccgctccctccgtgttcatcttcccaccttccgacgagcagctgaagtccggcaccgcttctgtcgtgtgcctgctgaacaacttctacccccgcgaggccaaggtgcagtggaaggtggacaacgccctgcagtccggcaactcccaggaatccgtgaccgagcaggactccaaggacagcacctactccctgtcctccaccctgaccctgtccaaggccgactacgagaagcacaaggtgtacgcctgcgaagtgacccaccagggcctgtctagccccgtgaccaagtctttcaaccggggcgagtgt

SEQ ID NO: 434 - DNA, 644 bp, Homo Sapiens
gaaattgtgttgacgcagtctccaggcaccctgtctttgtctccaggggaaagagccaccctctcctgcagggccagtcagagtgttagcagcagctacttagcctggtaccagcagaaacctggccaggctcccaggctcctcatatatggtgcatccagcagggccactggcatcccagacaggttcagtggcagtgggtctgggacagacttcactctcaccatcagaagactggagcctgaagattttgcagtgtattactgtcagcagtatggtagttcaccattcacttcggccctgggaccaaagtggatatcaaacgtacggtggccgctccctccgtgttcatcttcccaccttccgacgagcagctgaagtccggcaccgcttctgtcgtgtgcctgctgaacaacttctacccccgcgaggccaaggtgcagtggaaggtggacaacgccctgcagtccggcaactcccaggaatccgtgaccgagcaggactccaaggacagcacctactccctgtcctccaccctgaccctgtccaaggccgactacgagaagcacaaggtgtacgcctgcgaagtgacccaccagggcctgtctagccccgtgaccaagtctttcaaccggggcgagtgt

SEQ ID NO: 435 - protein, 8 aa, Homo Sapiens
GYTFNSYG

SEQ ID NO: 436 - protein, 8 aa, Homo Sapiens
ISVHNGNT

SEQ ID NO: 437 - protein, 17 aa, Homo Sapiens
ARAGYDILTDFSDAFDI

SEQ ID NO: 438 - protein, 124 aa, Homo Sapiens
QVQLVQSGAEVKKPGASVKVSCKASGYTFNSYGIIWVRQAPGQGLEWMGWISVHNGNTNCAQKLQGRVTMTTDTSTSTAYMELRSLRTDDTAVYYCARAGYDILTDFSDAFDIWGHGTMVTVSS

SEQ ID NO: 439 - DNA, 372 bp, Homo Sapiens
caggttcagttggtgcagtctggagctgaggtgaagaagcctggggcctcagtgaaggtctcctgcaaggcttctggttacacctttaatagttatggtatcatctgggtgcgacaggcccctggacaagggcttgagtggatgggatggatcagcgttcacaatggtaacacaaactgtgcacagaagctccagggtagagtcaccatgaccacagacacatccacgagcacagcctacatggagctgaggagcctgagaactgacgacacggccgtgtattactgtgcgagagcgggttacgatattttgactgatttttccgatgcttttgatatctggggccacgggacaatggtcaccgtctcttca

SEQ ID NO: 440 - protein, 454 aa, Homo Sapiens
QVQLVQSGAEVKKPGASVKVSCKASGYTFNSYGIIWVRQAPGQGLEWMGWISVHNGNTNCAQKLQGRVTMTTDTSTSTAYMELRSLRTDDTAVYYCARAGYDILTDFSDAFDIWGHGTMVTVSSASTKGPSVFPLAPSSKSTSGGTAALGCLVKDYFPEPVTVSWNSGALTSGVHTFPAVLQSSGLYSLSSVVTVPSSSLGTQTYICNVNHKPSNTKVDKKVEPKSCDKTHTCPPCPAPELLGGPSVFLFPPKPKDTLMISRTPEVTCVVVDVSHEDPEVKFNWYVDGVEVHNAKTKPREEQYNSTYRVVSVLTVLHQDWLNGKEYKCKVSNKALPAPIEKTISKAKGQPREPQVYTLPPSRDELTKNQVSLTCLVKGFYPSDIAVEWESNGQPENNYKTTPPVLDSDGSFFLYSKLTVDKSRWQQGNVFSCSVMHEALHNHYTQKSLSLSPGK

SEQ ID NO: 441 - DNA, 1368 bp, Homo Sapiens
caggttcagttggtgcagtctggagctgaggtgaagaagcctggggcctcagtgaaggtctcctgcaaggcttctggttacacctttaatagttatggtatcatctgggtgcgacaggcccctggacaagggcttgagtggatgggatggatcagcgttcacaatggtaacacaaactgtgcacagaagctccagggtagagtcaccatgaccacagacacatccacgagcacagcctacatggagctgaggagcctgagaactgacgacacggccgtgtattactgtgcgagagcgggttacgatattttgactgatttttccgatgcttttgatatctggggccacgggacaatggtcaccgtctcttcagccagcaccaagggcccctctgtgttccctctggccccttccagcaagtccacctctggcggaacagccgctctgggctgcctcgtgaaggactacttccccgagcctgtgaccgtgtcctggaactctggcgctctgaccagcggagtgcacaccttccctgctgtgctgcagtcctccggcctgtactccctgtcctccgtcgtgaccgtgccttccagctctctgggcacccagacctacatctgcaacgtgaaccacaagccctccaacaccaaggtggacaagaaggtggaacccaagtcctgcgacaagacccacacctgtcccccttgtcctgcccctgaactgctgggcggaccttccgtgttcctgttccccccaaagcccaaggacaccctgatgatctcccggacccccgaagtgacctgcgtggtggtggatgtgtcccacgaggaccctgaagtgaagttcaattggtacgtggacggcgtggaagtgcacaacgccaagaccaagcctagagaggaacagtacaactccacctaccgggtggtgtccgtgctgaccgtgctgcaccaggattggctgaacggcaaagagtacaagtgcaaggtgtccaacaaggccctgcctgcccccatcgaaaagaccatctccaaggccaagggccagccccgggaaccccaggtgtacacactgccccctagcagggacgagctgaccaagaaccaggtgtccctgacctgtctcgtgaaaggcttctacccctccgatatcgccgtggaatgggagtccaacggccagcctgagaacaactacaagaccaccccccctgtgctggactccgacggctcattcttcctgtacagcaagctgacagtggacaagtcccggtggcagcagggcaacgtgttctcctgctccgtgatgcacgaggccctgcacaaccactacacccagaagtccctgtccctgagccccggcaagtgatga

SEQ ID NO: 442 - protein, 6 aa, Homo Sapiens
QNINNF

SEQ ID NO: 443 - protein, 3 aa, Homo Sapiens
AAS

SEQ ID NO: 444 - protein, 8 aa, Homo Sapiens
QQSYGIPW

SEQ ID NO: 445 - protein, 106 aa, Homo Sapiens
DIQMTQSPSSLSASVGDRVTITCRASQNINNFLNWYQQKEGKGPKLLIYAASSLQRGIPSTFSGSGSGTDFTLTISSLQPEDFATYICQQSYGIPWVGQGTKVEIK

SEQ ID NO: 446 - DNA, 318 bp, Homo Sapiens
gacatccagatgacccagtctccatcctccctgtctgcatctgtaggagacagagtcaccatcacttgccgggcaagtcagaacattaataactttttaaattggtatcagcagaaagaagggaaaggccctaagctcctgatctatgcagcatccagtttgcaaagagggataccatcaacgttcagtggcagtggatctgggacagacttcactctcaccatcagcagtctgcaacctgaagattttgcaacttacatctgtcaacagagctacggtatcccgtgggtcggccaagggaccaaggtggaaatcaaa

SEQ ID NO: 447 - protein, 213 aa, Homo Sapiens
DIQMTQSPSSLSASVGDRVTITCRASQNINNFLNWYQQKEGKGPKLLIYAASSLQRGIPSTFSGSGSGTDFTLTISSLQPEDFATYICQQSYGIPWVGQGTKVEIKRTVAAPSVFIFPPSDEQLKSGTASVVCLLNNFYPREAKVQWKVDNALQSGNSQESVTEQDSKDSTYSLSSTLTLSKADYEKHKVYACEVTHQGLSSPVTKSFNRGEC

SEQ ID NO: 448 - DNA, 639 bp, Homo Sapiens
gacatccagatgacccagtctccatcctccctgtctgcatctgtaggagacagagtcaccatcacttgccgggcaagtcagaacattaataactttttaaattggtatcagcagaaagaagggaaaggccctaagctcctgatctatgcagcatccagtttgcaaagagggataccatcaacgttcagtggcagtggatctgggacagacttcactctcaccatcagcagtctgcaacctgaagattttgcaacttacatctgtcaacagagctacggtatcccgtgggtcggccaagggaccaaggtggaaatcaaacgtacggtggccgctccctccgtgttcatcttcccaccttccgacgagcagctgaagtccggcaccgcttctgtcgtgtgcctgctgaacaacttctacccccgcgaggccaaggtgcagtggaaggtggacaacgccctgcagtccggcaactcccaggaatccgtgaccgagcaggactccaaggacagcacctactccctgtcctccaccctgaccctgtccaaggccgactacgagaagcacaaggtgtacgcctgcgaagtgacccaccagggcctgtctagccccgtgaccaagtctttcaaccggggcgagtgt

SEQ ID NO: 449 - protein, 8 aa, Homo Sapiens
GFTFSDYF

SEQ ID NO: 450 - protein, 8 aa, Homo Sapiens
ISSSGSTI

SEQ ID NO: 451 - protein, 21 aa, Homo Sapiens
ARDHYDGSGIYPLYYYYGLDV

SEQ ID NO: 452 - protein, 128 aa, Homo Sapiens
QVQLVESGGGLVKPGGSLRLSCAASGFTFSDYFMSWIRQAPGKGLEWISYISSSGSTIYYADSVRGRFTISRDNAKYSLYLQMNSLRSEDTAVYYCARDHYDGSGIYPLYYYYGLDVWGQGTTVTVSS

SEQ ID NO: 453 - DNA, 384 bp, Homo Sapiens
caggtgcagctggtggagtctgggggaggcttggtcaagcctggagggtccctgagactctcctgtgcagcctctggattcaccttcagtgactacttcatgagctggatccgccaggcgccagggaaggggctggagtggatttcatacattagttctagtggtagtaccatatactacgcagactctgtgaggggccgattcaccatctccagggacaacgccaagtactcactgtatctgcaaatgaacagcctgagatccgaggacacggccgtgtattactgtgcgagagatcactacgatggttcggggatttatcccctctactactattacggtttggacgtctggggccaggggaccacggtcaccgtctcctca

SEQ ID NO: 454 - protein, 458 aa, Homo Sapiens
QVQLVESGGGLVKPGGSLRLSCAASGFTFSDYFMSWIRQAPGKGLEWISYISSSGSTIYYADSVRGRFTISRDNAKYSLYLQMNSLRSEDTAVYYCARDHYDGSGIYPLYYYYGLDVWGQGTTVTVSSASTKGPSVFPLAPSSKSTSGGTAALGCLVKDYFPEPVTVSWNSGALTSGVHTFPAVLQSSGLYSLSSVVTVPSSSLGTQTYICNVNHKPSNTKVDKKVEPKSCDKTHTCPPCPAPELLGGPSVFLFPPKPKDTLMISRTPEVTCVVVDVSHEDPEVKFNWYVDGVEVHNAKTKPREEQYNSTYRVVSVLTVLHQDWLNGKEYKCKVSNKALPAPIEKTISKAKGQPREPQVYTLPPSRDELTKNQVSLTCLVKGFYPSDIAVEWESNGQPENNYKTTPPVLDSDGSFFLYSKLTVDKSRWQQGNVFSCSVMHEALHNHYTQKSLSLSPGK

SEQ ID NO: 455 - DNA, 1380 bp, Homo Sapiens
caggtgcagctggtggagtctgggggaggcttggtcaagcctggagggtccctgagactctcctgtgcagcctctggattcaccttcagtgactacttcatgagctggatccgccaggcgccagggaaggggctggagtggatttcatacattagttctagtggtagtaccatatactacgcagactctgtgaggggccgattcaccatctccagggacaacgccaagtactcactgtatctgcaaatgaacagcctgagatccgaggacacggccgtgtattactgtgcgagagatcactacgatggttcggggatttatcccctctactactattacggtttggacgtctggggccaggggaccacggtcaccgtctcctcagccagcaccaagggcccctctgtgttccctctggccccttccagcaagtccacctctggcggaacagccgctctgggctgcctcgtgaaggactacttccccgagcctgtgaccgtgtcctggaactctggcgctctgaccagcggagtgcacaccttccctgctgtgctgcagtcctccggcctgtactccctgtcctccgtcgtgaccgtgccttccagctctctgggcacccagacctacatctgcaacgtgaaccacaagccctccaacaccaaggtggacaagaaggtggaacccaagtcctgcgacaagacccacacctgtcccccttgtcctgcccctgaactgctgggcggaccttccgtgttcctgttccccccaaagcccaaggacaccctgatgatctcccggacccccgaagtgacctgcgtggtggtggatgtgtcccacgaggaccctgaagtgaagttcaattggtacgtggacggcgtggaagtgcacaacgccaagaccaagcctagagaggaacagtacaactccacctaccgggtggtgtccgtgctgaccgtgctgcaccaggattggctgaacggcaaagagtacaagtgcaaggtgtccaacaaggccctgcctgcccccatcgaaaagaccatctccaaggccaagggccagccccgggaaccccaggtgtacacactgccccctagcagggacgagctgaccaagaaccaggtgtccctgacctgtctcgtgaaaggcttctacccctccgatatcgccgtggaatgggagtccaacggccagcctgagaacaactacaagaccaccccccctgtgctggactccgacggctcattcttcctgtacagcaagctgacagtggacaagtcccggtggcagcagggcaacgtgttctcctgctccgtgatgcacgaggccctgcacaaccactacacccagaagtccctgtccctgagccccggcaagtgatga

SEQ ID NO: 456 - protein, 11 aa, Homo Sapiens
QSLLHSNGYNY

SEQ ID NO: 457 - protein, 3 aa, Homo Sapiens
LGS

SEQ ID NO: 458 - protein, 9 aa, Homo Sapiens
MQALQTPRS

SEQ ID NO: 459 - protein, 111 aa, Homo Sapiens
IVMTQSPLSLPVTPGEPASISCRSSQSLLHSNGYNYLDYYLQKPGQSPQLLIYLGSYRASGVPDRFSGSGSGTDFTLKISRVEAEDVGVYYCMQALQTPRSFGQGTTLEIK

SEQ ID NO: 460 - DNA, 333 bp, Homo Sapiens
attgtgatgactcagtctccactctccctacccgtcacccctggagagccggcctccatctcctgcaggtctagtcagagcctcctgcatagtaatggatacaactatttggattattacctgcagaagccagggcagtctccacagctcctgatctatttgggttcttatcgggcctccggggtccctgacaggttcagtggcagtggatcaggcacagattttacactgaaaatcagcagagtggaggctgaggatgttggggtttattactgcatgcaagctctacaaactcctcgcagttttggccaggggaccacgctggagatcaaa

SEQ ID NO: 461 - protein, 218 aa, Homo Sapiens
IVMTQSPLSLPVTPGEPASISCRSSQSLLHSNGYNYLDYYLQKPGQSPQLLIYLGSYRASGVPDRFSGSGSGTDFTLKISRVEAEDVGVYYCMQALQTPRSFGQGTTLEIKRTVAAPSVFIFPPSDEQLKSGTASVVCLLNNFYPREAKVQWKVDNALQSGNSQESVTEQDSKDSTYSLSSTLTLSKADYEKHKVYACEVTHQGLSSPVTKSFNRGEC

SEQ ID NO: 462 - DNA, 654 bp, Homo Sapiens
attgtgatgactcagtctccactctccctacccgtcacccctggagagccggcctccatctcctgcaggtctagtcagagcctcctgcatagtaatggatacaactatttggattattacctgcagaagccagggcagtctccacagctcctgatctatttgggttcttatcgggcctccggggtccctgacaggttcagtggcagtggatcaggcacagattttacactgaaaatcagcagagtggaggctgaggatgttggggtttattactgcatgcaagctctacaaactcctcgcagttttggccaggggaccacgctggagatcaaacgtacggtggccgctccctccgtgttcatcttcccaccttccgacgagcagctgaagtccggcaccgcttctgtcgtgtgcctgctgaacaacttctacccccgcgaggccaaggtgcagtggaaggtggacaacgccctgcagtccggcaactcccaggaatccgtgaccgagcaggactccaaggacagcacctactccctgtcctccaccctgaccctgtccaaggccgactacgagaagcacaaggtgtacgcctgcgaagtgacccaccagggcctgtctagccccgtgaccaagtctttcaaccggggcgagtgt

SEQ ID NO: 463 - protein, 10 aa, Homo Sapiens
GFSLSTTGVG

SEQ ID NO: 464 - protein, 7 aa, Homo Sapiens
IYWDDDK

SEQ ID NO: 465 - protein, 16 aa, Homo Sapiens
THGYGSASYYHYGMDV

SEQ ID NO: 466 - protein, 124 aa, Homo Sapiens
QITLKESGPTLVKPTQTLTLTCTFSGFSLSTTGVGVGWIRQPPGKALEWLAVIYWDDDKRYSPSLKSRLTITKDTSKNQVVLTMTNMDPVDTATYFCTHGYGSASYYHYGMDVWGQGTTVTVSS

SEQ ID NO: 467 - DNA, 372 bp, Homo Sapiens
cagatcaccttgaaggagtctggtcctacgctggtgaaacccacacagaccctcacgctgacctgcaccttctctgggttctcactcagcactactggagtgggtgtgggctggatccgtcagcccccaggaaaggccctggagtggcttgcagtcatttattgggatgatgataagcgctacagcccatctctgaagagcagactcaccatcaccaaggacacctccaaaaaccaggtggtccttacaatgaccaacatggaccctgtggacacagccacatatttctgtacacacggatatggttcggcgagttattaccactacggtatggacgtctggggccaagggaccacggtcaccgtctcctca

SEQ ID NO: 468 - protein, 454 aa, Homo Sapiens
QITLKESGPTLVKPTQTLTLTCTFSGFSLSTTGVGVGWIRQPPGKALEWLAVIYWDDDKRYSPSLKSRLTITKDTSKNQVVLTMTNMDPVDTATYFCTHGYGSASYYHYGMDVWGQGTTVTVSSASTKGPSVFPLAPSSKSTSGGTAALGCLVKDYFPEPVTVSWNSGALTSGVHTFPAVLQSSGLYSLSSVVTVPSSSLGTQTYICNVNHKPSNTKVDKKVEPKSCDKTHTCPPCPAPELLGGPSVFLFPPKPKDTLMISRTPEVTCVVVDVSHEDPEVKFNWYVDGVEVHNAKTKPREEQYNSTYRVVSVLTVLHQDWLNGKEYKCKVSNKALPAPIEKTISKAKGQPREPQVYTLPPSRDELTKNQVSLTCLVKGFYPSDIAVEWESNGQPENNYKTTPPVLDSDGSFFLYSKLTVDKSRWQQGNVFSCSVMHEALHNHYTQKSLSLSPGK

SEQ ID NO: 469 - DNA, 1368 bp, Homo Sapiens
cagatcaccttgaaggagtctggtcctacgctggtgaaacccacacagaccctcacgctgacctgcaccttctctgggttctcactcagcactactggagtgggtgtgggctggatccgtcagcccccaggaaaggccctggagtggcttgcagtcatttattgggatgatgataagcgctacagcccatctctgaagagcagactcaccatcaccaaggacacctccaaaaaccaggtggtccttacaatgaccaacatggaccctgtggacacagccacatatttctgtacacacggatatggttcggcgagttattaccactacggtatggacgtctggggccaagggaccacggtcaccgtctcctcagccagcaccaagggcccctctgtgttccctctggccccttccagcaagtccacctctggcggaacagccgctctgggctgcctcgtgaaggactacttccccgagcctgtgaccgtgtcctggaactctggcgctctgaccagcggagtgcacaccttccctgctgtgctgcagtcctccggcctgtactccctgtcctccgtcgtgaccgtgccttccagctctctgggcacccagacctacatctgcaacgtgaaccacaagccctccaacaccaaggtggacaagaaggtggaacccaagtcctgcgacaagacccacacctgtcccccttgtcctgcccctgaactgctgggcggaccttccgtgttcctgttccccccaaagcccaaggacaccctgatgatctcccggacccccgaagtgacctgcgtggtggtggatgtgtcccacgaggaccctgaagtgaagttcaattggtacgtggacggcgtggaagtgcacaacgccaagaccaagcctagagaggaacagtacaactccacctaccgggtggtgtccgtgctgaccgtgctgcaccaggattggctgaacggcaaagagtacaagtgcaaggtgtccaacaaggccctgcctgcccccatcgaaaagaccatctccaaggccaagggccagccccgggaaccccaggtgtacacactgccccctagcagggacgagctgaccaagaaccaggtgtccctgacctgtctcgtgaaaggcttctacccctccgatatcgccgtggaatgggagtccaacggccagcctgagaacaactacaagaccaccccccctgtgctggactccgacggctcattcttcctgtacagcaagctgacagtggacaagtcccggtggcagcagggcaacgtgttctcctgctccgtgatgcacgaggccctgcacaaccactacacccagaagtccctgtccctgagccccggcaagtgatga

SEQ ID NO: 470 - protein, 6 aa, Homo Sapiens
QSVTNY

SEQ ID NO: 471 - protein, 3 aa, Homo Sapiens
DAS

SEQ ID NO: 472 - protein, 9 aa, Homo Sapiens
QHRSNWPLT

SEQ ID NO: 473 - protein, 107 aa, Homo Sapiens
EIVLTQSPATLSLSPGERATLSCRASQSVTNYLAWHQQKPGQAPRLLIYDASNRATGIPARFSGSGSGTDFTLTISSLEPEDFAVYYCQHRSNWPLTFGGGTKVEIK

SEQ ID NO: 474 - DNA, 322 bp, Homo Sapiens
gaaattgtattgacacagtctccagccaccctgtctttgtctccaggggaaagagccaccctctcctgcagggccagtcagagtgttaccaactacttagcctggcaccaacagaaacctggccaggctcccaggctcctcatctatgatgcatccaacagggccactggcatcccagccaggttcagtggcagtgggtctgggacagacttcactctcaccatcagcagcctagagcctgaagattttgcagtttattactgtcagcaccgtagcaactggcctctcactttcggcggagggaccaaggtggagatcaaac

SEQ ID NO: 475 - protein, 214 aa, Homo Sapiens
EIVLTQSPATLSLSPGERATLSCRASQSVTNYLAWHQQKPGQAPRLLIYDASNRATGIPARFSGSGSGTDFTLTISSLEPEDFAVYYCQHRSNWPLTFGGGTKVEIKRTVAAPSVFIFPPSDEQLKSGTASVVCLLNNFYPREAKVQWKVDNALQSGNSQESVTEQDSKDSTYSLSSTLTLSKADYEKHKVYACEVTHQGLSSPVTKSFNRGEC

SEQ ID NO: 476 - DNA, 643 bp, Homo Sapiens
gaaattgtattgacacagtctccagccaccctgtctttgtctccaggggaaagagccaccctctcctgcagggccagtcagagtgttaccaactacttagcctggcaccaacagaaacctggccaggctcccaggctcctcatctatgatgcatccaacagggccactggcatcccagccaggttcagtggcagtgggtctgggacagacttcactctcaccatcagcagcctagagcctgaagattttgcagtttattactgtcagcaccgtagcaactggcctctcactttcggcggagggaccaaggtggagatcaaaccgtacggtggccgctccctccgtgttcatcttcccaccttccgacgagcagctgaagtccggcaccgcttctgtcgtgtgcctgctgaacaacttctacccccgcgaggccaaggtgcagtggaaggtggacaacgccctgcagtccggcaactcccaggaatccgtgaccgagcaggactccaaggacagcacctactccctgtcctccaccctgaccctgtccaaggccgactacgagaagcacaaggtgtacgcctgcgaagtgacccaccagggcctgtctagccccgtgaccaagtctttcaaccggggcgagtgt

SEQ ID NO: 477 - protein, 10 aa, Homo Sapiens
GFSLSTSGVG

SEQ ID NO: 478 - protein, 7 aa, Homo Sapiens
IYWDDDK

SEQ ID NO: 479 - protein, 16 aa, Homo Sapiens
THGYGSASYYHYGMDV

SEQ ID NO: 480 - protein, 124 aa, Homo Sapiens
QITLKESGPTLVKPTQTLTLTCTFSGFSLSTSGVGVGWIRQPPGKALEWLAVIYWDDDKRYSPSLKSRLTITKDTSKNQVVLTMTNMDPVDTATYFCTHGYGSASYYHYGMDVWGQGTTVTVSS

SEQ ID NO: 481 - DNA, 372 bp, Homo Sapiens
cagatcaccttgaaggagtctggtcctacgctggtgaaacccacacagaccctcacgctgacctgcaccttctctgggttctcactcagcactagtggagtgggtgtgggctggatccgtcagcccccaggaaaggccctggagtggcttgcagtcatttattgggatgatgataagcgctacagcccatctctgaagagcaggctcaccatcaccaaggacacctccaaaaaccaggtggtccttacaatgaccaacatggaccctgtggacacagccacatatttctgtacacacggatatggttcggcgagttattaccactacggtatggacgtctggggccaagggaccacggtcaccgtctcctca

SEQ ID NO: 482 - protein, 454 aa, Homo Sapiens
QITLKESGPTLVKPTQTLTLTCTFSGFSLSTSGVGVGWIRQPPGKALEWLAVIYWDDDKRYSPSLKSRLTITKDTSKNQVVLTMTNMDPVDTATYFCTHGYGSASYYHYGMDVWGQGTTVTVSSASTKGPSVFPLAPSSKSTSGGTAALGCLVKDYFPEPVTVSWNSGALTSGVHTFPAVLQSSGLYSLSSVVTVPSSSLGTQTYICNVNHKPSNTKVDKKVEPKSCDKTHTCPPCPAPELLGGPSVFLFPPKPKDTLMISRTPEVTCVVVDVSHEDPEVKFNWYVDGVEVHNAKTKPREEQYNSTYRVVSVLTVLHQDWLNGKEYKCKVSNKALPAPIEKTISKAKGQPREPQVYTLPPSRDELTKNQVSLTCLVKGFYPSDIAVEWESNGQPENNYKTTPPVLDSDGSFFLYSKLTVDKSRWQQGNVFSCSVMHEALHNHYTQKSLSLSPGK

SEQ ID NO: 483 - DNA, 1368 bp, Homo Sapiens
cagatcaccttgaaggagtctggtcctacgctggtgaaacccacacagaccctcacgctgacctgcaccttctctgggttctcactcagcactagtggagtgggtgtgggctggatccgtcagcccccaggaaaggccctggagtggcttgcagtcatttattgggatgatgataagcgctacagcccatctctgaagagcaggctcaccatcaccaaggacacctccaaaaaccaggtggtccttacaatgaccaacatggaccctgtggacacagccacatatttctgtacacacggatatggttcggcgagttattaccactacggtatggacgtctggggccaagggaccacggtcaccgtctcctcagccagcaccaagggcccctctgtgttccctctggccccttccagcaagtccacctctggcggaacagccgctctgggctgcctcgtgaaggactacttccccgagcctgtgaccgtgtcctggaactctggcgctctgaccagcggagtgcacaccttccctgctgtgctgcagtcctccggcctgtactccctgtcctccgtcgtgaccgtgccttccagctctctgggcacccagacctacatctgcaacgtgaaccacaagccctccaacaccaaggtggacaagaaggtggaacccaagtcctgcgacaagacccacacctgtcccccttgtcctgcccctgaactgctgggcggaccttccgtgttcctgttccccccaaagcccaaggacaccctgatgatctcccggacccccgaagtgacctgcgtggtggtggatgtgtcccacgaggaccctgaagtgaagttcaattggtacgtggacggcgtggaagtgcacaacgccaagaccaagcctagagaggaacagtacaactccacctaccgggtggtgtccgtgctgaccgtgctgcaccaggattggctgaacggcaaagagtacaagtgcaaggtgtccaacaaggccctgcctgcccccatcgaaaagaccatctccaaggccaagggccagccccgggaaccccaggtgtacacactgccccctagcagggacgagctgaccaagaaccaggtgtccctgacctgtctcgtgaaaggcttctacccctccgatatcgccgtggaatgggagtccaacggccagcctgagaacaactacaagaccaccccccctgtgctggactccgacggctcattcttcctgtacagcaagctgacagtggacaagtcccggtggcagcagggcaacgtgttctcctgctccgtgatgcacgaggccctgcacaaccactacacccagaagtccctgtccctgagccccggcaagtgatga

SEQ ID NO: 484 - protein, 6 aa, Homo Sapiens
QSVTNY

SEQ ID NO: 485 - protein, 3 aa, Homo Sapiens
DAS

SEQ ID NO: 486 - protein, 9 aa, Homo Sapiens
QQRSNWPLT

SEQ ID NO: 487 - protein, 107 aa, Homo Sapiens
EIVLTQSPATLSLSPGERATLSCRASQSVTNYLAWHQQKPGQAPRLLIYDASNRATGIPARFSGSGSGTDFTLTISSLEPEDFAVYYCQQRSNWPLTFGGGTKVEIK

SEQ ID NO: 488 - DNA, 321 bp, Homo Sapiens
gaaattgtgttgacacagtctccagccaccctgtctttgtctccaggggaaagagccaccctctcctgcagggccagtcagagtgttaccaactacttagcctggcaccaacagaaacctggccaggctcccaggctcctcatctatgatgcatccaacagggccactggcatcccagccaggttcagtggcagtgggtctgggacagacttcactctcaccatcagcagcctagagcctgaagattttgcagtttattactgtcagcagcgtagcaactggcctctcactttcggcggagggaccaaggtggagatcaaa

SEQ ID NO: 489 - protein, 214 aa, Homo Sapiens
EIVLTQSPATLSLSPGERATLSCRASQSVTNYLAWHQQKPGQAPRLLIYDASNRATGIPARFSGSGSGTDFTLTISSLEPEDFAVYYCQQRSNWPLTFGGGTKVEIKRTVAAPSVFIFPPSDEQLKSGTASVVCLLNNFYPREAKVQWKVDNALQSGNSQESVTEQDSKDSTYSLSSTLTLSKADYEKHKVYACEVTHQGLSSPVTKSFNRGEC

SEQ ID NO: 490 - DNA, 642 bp, Homo Sapiens
gaaattgtgttgacacagtctccagccaccctgtctttgtctccaggggaaagagccaccctctcctgcagggccagtcagagtgttaccaactacttagcctggcaccaacagaaacctggccaggctcccaggctcctcatctatgatgcatccaacagggccactggcatcccagccaggttcagtggcagtgggtctgggacagacttcactctcaccatcagcagcctagagcctgaagattttgcagtttattactgtcagcagcgtagcaactggcctctcactttcggcggagggaccaaggtggagatcaaacgtacggtggccgctccctccgtgttcatcttcccaccttccgacgagcagctgaagtccggcaccgcttctgtcgtgtgcctgctgaacaacttctacccccgcgaggccaaggtgcagtggaaggtggacaacgccctgcagtccggcaactcccaggaatccgtgaccgagcaggactccaaggacagcacctactccctgtcctccaccctgaccctgtccaaggccgactacgagaagcacaaggtgtacgcctgcgaagtgacccaccagggcctgtctagccccgtgaccaagtctttcaaccggggcgagtgt

SEQ ID NO: 491 - protein, 8 aa, Homo Sapiens
GFTFSDYY

SEQ ID NO: 492 - protein, 8 aa, Homo Sapiens
ISSSGSTI

SEQ ID NO: 493 - protein, 20 aa, Homo Sapiens
ARDFYDILTDSPYFYYGVDV

SEQ ID NO: 494 - protein, 127 aa, Homo Sapiens
QVQLVESGGGLVKPGGSLRLSCAASGFTFSDYYMSWIRQAPGKGLEWVSYISSSGSTIYYADSVKGRFTISRDNAKNSLYLQINSLRAEDTAVYYCARDFYDILTDSPYFYYGVDVWGQGTTVTVSS

SEQ ID NO: 495 - DNA, 381 bp, Homo Sapiens
caggtgcagctggtggagtctgggggaggcttggtcaagcctggagggtccctgagactctcctgtgcagcctctggattcaccttcagtgactactacatgagctggatccgccaggctccagggaaggggctggagtgggtttcatacattagtagtagtggtagtaccatatactacgcagactctgtgaagggccgattcaccatctccagggacaacgccaagaactcactgtatctgcaaattaacagcctgagagccgaggacacggccgtgtattactgtgcgagagatttttacgatattttgactgatagtccgtacttctactacggtgtggacgtctggggccaagggaccacggtcaccgtctcctca

SEQ ID NO: 496 - protein, 457 aa, Homo Sapiens
QVQLVESGGGLVKPGGSLRLSCAASGFTFSDYYMSWIRQAPGKGLEWVSYISSSGSTIYYADSVKGRFTISRDNAKNSLYLQINSLRAEDTAVYYCARDFYDILTDSPYFYYGVDVWGQGTTVTVSSASTKGPSVFPLAPSSKSTSGGTAALGCLVKDYFPEPVTVSWNSGALTSGVHTFPAVLQSSGLYSLSSVVTVPSSSLGTQTYICNVNHKPSNTKVDKKVEPKSCDKTHTCPPCPAPELLGGPSVFLFPPKPKDTLMISRTPEVTCVVVDVSHEDPEVKFNWYVDGVEVHNAKTKPREEQYNSTYRVVSVLTVLHQDWLNGKEYKCKVSNKALPAPIEKTISKAKGQPREPQVYTLPPSRDELTKNQVSLTCLVKGFYPSDIAVEWESNGQPENNYKTTPPVLDSDGSFFLYSKLTVDKSRWQQGNVFSCSVMHEALHNHYTQKSLSLSPGK

SEQ ID NO: 497 - DNA, 1377 bp, Homo Sapiens
caggtgcagctggtggagtctgggggaggcttggtcaagcctggagggtccctgagactctcctgtgcagcctctggattcaccttcagtgactactacatgagctggatccgccaggctccagggaaggggctggagtgggtttcatacattagtagtagtggtagtaccatatactacgcagactctgtgaagggccgattcaccatctccagggacaacgccaagaactcactgtatctgcaaattaacagcctgagagccgaggacacggccgtgtattactgtgcgagagatttttacgatattttgactgatagtccgtacttctactacggtgtggacgtctggggccaagggaccacggtcaccgtctcctcagccagcaccaagggcccctctgtgttccctctggccccttccagcaagtccacctctggcggaacagccgctctgggctgcctcgtgaaggactacttccccgagcctgtgaccgtgtcctggaactctggcgctctgaccagcggagtgcacaccttccctgctgtgctgcagtcctccggcctgtactccctgtcctccgtcgtgaccgtgccttccagctctctgggcacccagacctacatctgcaacgtgaaccacaagccctccaacaccaaggtggacaagaaggtggaacccaagtcctgcgacaagacccacacctgtcccccttgtcctgcccctgaactgctgggcggaccttccgtgttcctgttccccccaaagcccaaggacaccctgatgatctcccggacccccgaagtgacctgcgtggtggtggatgtgtcccacgaggaccctgaagtgaagttcaattggtacgtggacggcgtggaagtgcacaacgccaagaccaagcctagagaggaacagtacaactccacctaccgggtggtgtccgtgctgaccgtgctgcaccaggattggctgaacggcaaagagtacaagtgcaaggtgtccaacaaggccctgcctgcccccatcgaaaagaccatctccaaggccaagggccagccccgggaaccccaggtgtacacactgccccctagcagggacgagctgaccaagaaccaggtgtccctgacctgtctcgtgaaaggcttctacccctccgatatcgccgtggaatgggagtccaacggccagcctgagaacaactacaagaccaccccccctgtgctggactccgacggctcattcttcctgtacagcaagctgacagtggacaagtcccggtggcagcagggcaacgtgttctcctgctccgtgatgcacgaggccctgcacaaccactacacccagaagtccctgtccctgagccccggcaagtgatga

SEQ ID NO: 498 - protein, 11 aa, Homo Sapiens
QSLLHSNGYNY

SEQ ID NO: 499 - protein, 3 aa, Homo Sapiens
LGS

SEQ ID NO: 500 - protein, 9 aa, Homo Sapiens
MQALQTPRT

SEQ ID NO: 501 - protein, 112 aa, Homo Sapiens
DIVMTQSPLSLPVTPGEPASISCRSSQSLLHSNGYNYLDWYLQKPGQSPQLLIYLGSNRASGVPDRFSGSGSGTDFTLKISRVEAEDVGVYYCMQALQTPRTFGQGTKVEIK

SEQ ID NO: 502 - DNA, 336 bp, Homo Sapiens
gatattgtgatgactcagtctccactctccctgcccgtcacccctggagagccggcctccatctcctgcaggtctagtcagagcctcctgcatagtaatggatacaactatttggattggtacctgcagaagccagggcagtctccacagctcctgatctatttgggttctaatcgggcctccggggtccctgacaggttcagtggcagtggatcaggcacagattttacactgaaaatcagcagagtggaggctgaggatgttggggtttattactgcatgcaagctctacaaactcctcggacgttcggccaagggaccaaggtggaaatcaaa

SEQ ID NO: 503 - protein, 219 aa, Homo Sapiens
DIVMTQSPLSLPVTPGEPASISCRSSQSLLHSNGYNYLDWYLQKPGQSPQLLIYLGSNRASGVPDRFSGSGSGTDFTLKISRVEAEDVGVYYCMQALQTPRTFGQGTKVEIKRTVAAPSVFIFPPSDEQLKSGTASVVCLLNNFYPREAKVQWKVDNALQSGNSQESVTEQDSKDSTYSLSSTLTLSKADYEKHKVYACEVTHQGLSSPVTKSFNRGEC

SEQ ID NO: 504 - DNA, 657 bp, Homo Sapiens
gatattgtgatgactcagtctccactctccctgcccgtcacccctggagagccggcctccatctcctgcaggtctagtcagagcctcctgcatagtaatggatacaactatttggattggtacctgcagaagccagggcagtctccacagctcctgatctatttgggttctaatcgggcctccggggtccctgacaggttcagtggcagtggatcaggcacagattttacactgaaaatcagcagagtggaggctgaggatgttggggtttattactgcatgcaagctctacaaactcctcggacgttcggccaagggaccaaggtggaaatcaaacgtacggtggccgctccctccgtgttcatcttcccaccttccgacgagcagctgaagtccggcaccgcttctgtcgtgtgcctgctgaacaacttctacccccgcgaggccaaggtgcagtggaaggtggacaacgccctgcagtccggcaactcccaggaatccgtgaccgagcaggactccaaggacagcacctactccctgtcctccaccctgaccctgtccaaggccgactacgagaagcacaaggtgtacgcctgcgaagtgacccaccagggcctgtctagccccgtgaccaagtctttcaaccggggcgagtgt

SEQ ID NO: 505 - protein, 239 aa, Homo Sapiens
FTVTVPKDLYVVEYGSNMTIECKFPVEKQLDLAALIVYWEMEDKNIIQFVHGEEDLKVQHSSYRQRARLLKDQLSLGNAALQITDVKLQDAGVYRCMISYGGADYKRITVKVNAPYNKINQRILVVDPVTSEHELTCQAEGYPKAEVIWTSSDHQVLSGKTTTTNSKREEKLFNVTSTLRINTTTNEIFYCTFRRLDPEENHTAELVIPELPLAHPPNERTIEGRDYKDDDDKHHHHHH

SEQ ID NO: 506 - protein, 179 aa, Homo Sapiens
EINGSANYEMFIFHNGGVQILCKYPDIVQQFKMQLLKGGQILCDLTKTKGSGNTVSIKSLKFCHSQLSNNSVSFFLYNLDHSHANYYFCNLSIFDPPPFKVTLTGGYLHIYESQLCCQLKFWLPIGCAAFVVVCILGCILICWLTKKKYSSSVHDPNGEYMFMRAVNTAKKSRLTDVTL

SEQ ID NO: 507 - protein, 121 aa, Homo Sapiens
EINGSANYEMFIFHNGGVQILCKYPDIVQQFKMQLLKGGQILCDLTKTKGSGNTVSIKSLKFCHSQLSNNSVSFFLYNLDHSHANYYFCNLSIFDPPPFKVTLTGGYLHIYESQLCCQLKF

SEQ ID NO: 508 - protein, 199 aa, Homo Sapiens
MKSGLWYFFLFCLRIKVLTGEINGSANYEMFIFHNGGVQILCKYPDIVQQFKMQLLKGGQILCDLTKTKGSGNTVSIKSLKFCHSQLSNNSVSFFLYNLDHSHANYYFCNLSIFDPPPFKVTLTGGYLHIYESQLCCQLKFWLPIGCAAFVVVCILGCILICWLTKKKYSSSVHDPNGEYMFMRAVNTAKKSRLTDVTL

SEQ ID NO: 509 - protein, 33 aa, Homo Sapiens
KYSSSVHDPNGEYMFMRAVNTAKKSRLTDVTLM

SEQ ID NO: 510 - protein, 128 aa, Mus Musculus
EINGSADHRMFSFHNGGVQISCKYPETVQQLKMRLFREREVLCELTKTKGSGNAVSIKNPMLCLYHLSNNSVSFFLNNPDSSQGSYYFCSLSIFDPPPFQERNLSGGYLHIYESQLCCQLKIVVQVTE

SEQ ID NO: 511 - protein, 121 aa, Mus Musculus
EINGSADHRMFSFHNGGVQISCKYPETVQQLKMRLFREREVLCELTKTKGSGNAVSIKNPMLCLYHLSNNSVSFFLNNPDSSQGSYYFCSLSIFDPPPFQERNLSGGYLHIYESQLCCQLK

SEQ ID NO: 512 - protein, 147 aa, Mus Musculus
MGWSCIILFLVATATGVHSEINGSADHRMFSFHNGGVQISCKYPETVQQLKMRLFREREVLCELTKTKGSGNAVSIKNPMLCLYHLSNNSVSFFLNNPDSSQGSYYFCSLSIFDPPPFQERNLSGGYLHIYESQLCCQLKIVVQVTE

SEQ ID NO: 513 - protein, 199 aa, Cynomologus
MKSGLWYFFLFCLHMKVLTGEINGSANYEMFIFHNGGVQILCKYPDIVQQFKMQLLKGGQILCDLTKTKGSGNKVSIKSLKFCHSQLSNNSVSFFLYNLDRSHANYYFCNLSIFDPPPFKVTLTGGYLHIYESQLCCQLKFWLPIGCATFVVVCIFGCILICWLTKKKYSSTVHDPNGEYMFMRAVNTAKKSRLTGTTP

SEQ ID NO: 514 - protein, 120 aa, Cynomologus
EINGSANYEMFIFHNGGVQILCKYPDIVQQFKMQLLKGGQILCDLTKTKGSGNKVSIKSLKFCHSQLSNNSVSFFLYNLDRSHANYYFCNLSIFDPPPFKVTLTGGYLHIYESQLCCQLK

SEQ ID NO: 515 - protein, 240 aa, Homo Sapiens
DTQEKEVRAMVGSDVELSCACPEGSRFDLNDVYVYWQTSESKTVVTYHIPQNSSLENVDSRYRNRALMSPAGMLRGDFSLRLFNVTPQDEQKFHCLVLSQSLGFQEVLSVEVTLHVAANFSVPVVSAPHSPSQDELTFTCTSINGYPRPNVYWINKTDNSLLDQALQNDTVFLNMRGLYDVVSVLRIARTPSVNIGCCIENVLLQQNLTVGSQTGNDIGERDKITENPVSTGEKNAATWS

SEQ ID NO: 516 - protein, 302 aa, Homo Sapiens
MRLGSPGLLFLLFSSLRADTQEKEVRAMVGSDVELSCACPEGSRFDLNDVYVYWQTSESKTVVTYHIPQNSSLENVDSRYRNRALMSPAGMLRGDFSLRLFNVTPQDEQKFHCLVLSQSLGFQEVLSVEVTLHVAANFSVPVVSAPHSPSQDELTFTCTSINGYPRPNVYWINKTDNSLLDQALQNDTVFLNMRGLYDVVSVLRIARTPSVNIGCCIENVLLQQNLTVGSQTGNDIGERDKITENPVSTGEKNAATWSILAVLCLLVVVAVAIGWVCRDRCLQHSYAGAWAVSPETELTGHV

SEQ ID NO: 517 - protein, 113 aa, Homo Sapiens
LQMILNGINNYKNPKLTAMLTFKFYMPKKATELKHLQCLEEELKPLEEVLNLAQSKNFHLRPRDLISNINVIVLELKGSETTFMCEYADETATIVEFLNRWITFCQSIISTLT

SEQ ID NO: 518 - protein, 113 aa, Homo Sapiens
LQMILNGINNYKNPKLTQMLTFKFYMPKKATELKHLQCLEEELKPLEEVLNLAQSKNFHLRPRDLISNINVIVLELKGSETTFMCEYADETATIVEFLNRWITFCQSIISTLT

SEQ ID NO: 519 - DNA, 336 bp, Homo Sapiens
gatattgtgatgactcagtctccactctccctgcccgtcacccctggagagccggcctccatctcctgcaggtctagtcagagcctcctgcatagtgatggatacaactatttggattggtacctgcagaagccagggcagtctccacagctcctgatctatttgggttctactcgggcctccgggttccctgacaggttcagtggcagtggatcaggcacagattttacactgaaaatcagcagagtggaggctgaggatgttggggtttattactgcatgcaagctctacaaactccgctcagttttggccaggggaccaagctggagatcaaa

SEQ ID NO: 520 - DNA, 657 bp, Homo Sapiens
gatattgtgatgactcagtctccactctccctgcccgtcacccctggagagccggcctccatctcctgcaggtctagtcagagcctcctgcatagtgatggatacaactatttggattggtacctgcagaagccagggcagtctccacagctcctgatctatttgggttctactcgggcctccgggttccctgacaggttcagtggcagtggatcaggcacagattttacactgaaaatcagcagagtggaggctgaggatgttggggtttattactgcatgcaagctctacaaactccgctcagttttggccaggggaccaagctggagatcaaacgtacggtggccgctccctccgtgttcatcttcccaccttccgacgagcagctgaagtccggcaccgcttctgtcgtgtgcctgctgaacaacttctacccccgcgaggccaaggtgcagtggaaggtggacaacgccctgcagtccggcaactcccaggaatccgtgaccgagcaggactccaaggacagcacctactccctgtcctccaccctgaccctgtccaaggccgactacgagaagcacaaggtgtacgcctgcgaagtgacccaccagggcctgtctagccccgtgaccaagtctttcaaccggggcgagtgt

SEQ ID NO: 521 - DNA, 372 bp, Homo Sapiens
gaggtgcagctggtggagtctgggggaggtgtggtacggcctggggggtccctgagactctcctgtgtagcctctggagtcacctttgatgattatggcatgagctgggtccgccaagctccagggaaggggctggagtgggtctctggtattaattggaatggtggcgacacagattattcagactctgtgaagggccgattcaccatctccagagacaacgccaagaactccctgtatctacaaatgaatagtctgagagccgaggacacggccttgtattactgtgcgagggatttctatggttcggggagttattatcacgttccttttgactactggggccagggaatcctggtcaccgtctcctca

SEQ ID NO: 522 - DNA, 1368 bp, Homo Sapiens
gaggtgcagctggtggagtctgggggaggtgtggtacggcctggggggtccctgagactctcctgtgtagcctctggagtcacctttgatgattatggcatgagctgggtccgccaagctccagggaaggggctggagtgggtctctggtattaattggaatggtggcgacacagattattcagactctgtgaagggccgattcaccatctccagagacaacgccaagaactccctgtatctacaaatgaatagtctgagagccgaggacacggccttgtattactgtgcgagggatttctatggttcggggagttattatcacgttccttttgactactggggccagggaatcctggtcaccgtctcctcagccagcaccaagggcccctctgtgttccctctggccccttccagcaagtccacctctggcggaacagccgctctgggctgcctcgtgaaggactacttccccgagcctgtgaccgtgtcctggaactctggcgctctgaccagcggagtgcacaccttccctgctgtgctgcagtcctccggcctgtactccctgtcctccgtcgtgaccgtgccttccagctctctgggcacccagacctacatctgcaacgtgaaccacaagccctccaacaccaaggtggacaagaaggtggaacccaagtcctgcgacaagacccacacctgtcccccttgtcctgcccctgaactgctgggcggaccttccgtgttcctgttccccccaaagcccaaggacaccctgatgatctcccggacccccgaagtgacctgcgtggtggtggatgtgtcccacgaggaccctgaagtgaagttcaattggtacgtggacggcgtggaagtgcacaacgccaagaccaagcctagagaggaacagtacaactccacctaccgggtggtgtccgtgctgaccgtgctgcaccaggattggctgaacggcaaagagtacaagtgcaaggtgtccaacaaggccctgcctgcccccatcgaaaagaccatctccaaggccaagggccagccccgggaaccccaggtgtacacactgccccctagcagggacgagctgaccaagaaccaggtgtccctgacctgtctcgtgaaaggcttctacccctccgatatcgccgtggaatgggagtccaacggccagcctgagaacaactacaagaccaccccccctgtgctggactccgacggctcattcttcctgtacagcaagctgacagtggacaagtcccggtggcagcagggcaacgtgttctcctgctccgtgatgcacgaggccctgcacaaccactacacccagaagtccctgtccctgagccccggcaagtgatga

SEQ ID NO: 523 - DNA, 990 bp, Homo Sapiens
gcctccaccaagggcccatcggtcttccccctggcaccctcctccaagagcacctctgggggcacagcggccctgggctgcctggtcaaggactacttccccgaaccggtgacggtgtcgtggaactcaggcgccctgaccagcggcgtgcacaccttcccggctgtcctacagtcctcaggactctactccctcagcagcgtggtgaccgtgccctccagcagcttgggcacccagacctacatctgcaacgtgaatcacaagcccagcaacaccaaggtggacaagagagttgagcccaaatcttgtgacaaaactcacacatgcccaccgtgcccagcacctgaactcctggggggaccgtcagtcttcctcttccccccaaaacccaaggacaccctcatgatctcccggacccctgaggtcacatgcgtggtggtggacgtgagccacgaagaccctgaggtcaagttcaactggtacgtggacggcgtggaggtgcataatgccaagacaaagccgcgggaggagcagtacaacagcacgtaccgtgtggtcagcgtcctcaccgtcctgcaccaggactggctgaatggcaaggagtacaagtgcaaggtctccaacaaagccctcccagcccccatcgagaaaaccatctccaaagccaaagggcagccccgagaaccacaggtgtacaccctgcccccatcccgggaggagatgaccaagaaccaggtcagcctgacctgcctggtcaaaggcttctatcccagcgacatcgccgtggagtgggagagcaatgggcagccggagaacaactacaagaccacgcctcccgtgctggactccgacggctccttcttcctctatagcaagctcaccgtggacaagagcaggtggcagcaggggaacgtcttctcatgctccgtgatgcatgaggctctgcacaaccactacacgcagaagagcctctccctgtccccgggtaaa

SEQ ID NO: 524 - protein, 330 aa, Homo Sapiens
ASTKGPSVFPLAPSSKSTSGGTAALGCLVKDYFPEPVTVSWNSGALTSGVHTFPAVLQSSGLYSLSSVVTVPSSSLGTQTYICNVNHKPSNTKVDKRVEPKSCDKTHTCPPCPAPELLGGPSVFLFPPKPKDTLMISRTPEVTCVVVDVSHEDPEVKFNWYVDGVEVHNAKTKPREEQYNSTYRVVSVLTVLHQDWLNGKEYKCKVSNKALPAPIEKTISKAKGQPREPQVYTLPPSREEMTKNQVSLTCLVKGFYPSDIAVEWESNGQPENNYKTTPPVLDSDGSFFLYSKLTVDKSRWQQGNVFSCSVMHEALHNHYTQKSLSLSPGK

SEQ ID NO: 525 - DNA, 990 bp, Homo Sapiens
gcctccaccaagggcccatcggtcttccccctggcaccctcctccaagagcacctctgggggcacagcggccctgggctgcctggtcaaggactacttccccgaaccggtgacggtgtcgtggaactcaggcgccctgaccagcggcgtgcacaccttcccggctgtcctacagtcctcaggactctactccctcagcagcgtggtgaccgtgccctccagcagcttgggcacccagacctacatctgcaacgtgaatcacaagcccagcaacaccaaggtggacaagaaagttgagcccaaatcttgtgacaaaactcacacatgcccaccgtgcccagcacctgaactcctggggggaccgtcagtcttcctcttccccccaaaacccaaggacaccctcatgatctcccggacccctgaggtcacatgcgtggtggtggacgtgagccacgaagaccctgaggtcaagttcaactggtacgtggacggcgtggaggtgcataatgccaagacaaagccgcgggaggagcagtacaacagcacgtaccgtgtggtcagcgtcctcaccgtcctgcaccaggactggctgaatggcaaggagtacaagtgcaaggtctccaacaaagccctcccagcccccatcgagaaaaccatctccaaagccaaagggcagccccgagaaccacaggtgtacaccctgcccccatcccgggatgagctgaccaagaaccaggtcagcctgacctgcctggtcaaaggcttctatcccagcgacatcgccgtggagtgggagagcaatgggcagccggagaacaactacaagaccacgcctcccgtgctggactccgacggctccttcttcctctacagcaagctcaccgtggacaagagcaggtggcagcaggggaacatcttctcatgctccgtgatgcatgaggctctgcacaaccactacacgcagaagagcctctccctgtctccgggtaaa

SEQ ID NO: 526 - protein, 330 aa, Homo Sapiens
ASTKGPSVFPLAPSSKSTSGGTAALGCLVKDYFPEPVTVSWNSGALTSGVHTFPAVLQSSGLYSLSSVVTVPSSSLGTQTYICNVNHKPSNTKVDKKVEPKSCDKTHTCPPCPAPELLGGPSVFLFPPKPKDTLMISRTPEVTCVVVDVSHEDPEVKFNWYVDGVEVHNAKTKPREEQYNSTYRVVSVLTVLHQDWLNGKEYKCKVSNKALPAPIEKTISKAKGQPREPQVYTLPPSRDELTKNQVSLTCLVKGFYPSDIAVEWESNGQPENNYKTTPPVLDSDGSFFLYSKLTVDKSRWQQGNIFSCSVMHEALHNHYTQKSLSLSPGK

SEQ ID NO: 527 - DNA, 978 bp, Homo Sapiens
gcctccaccaagggcccatcggtcttccccctggcgccctgctccaggagcacctccgagagcacagccgccctgggctgcctggtcaaggactacttccccgaaccggtgacggtgtcgtggaactcaggcgctctgaccagcggcgtgcacaccttcccagctgtcctacagtcctcaggactctactccctcagcagcgtggtgaccgtgccctccagcaacttcggcacccagacctacacctgcaacgtagatcacaagcccagcaacaccaaggtggacaagacagttgagcgcaaatgttgtgtcgagtgcccaccgtgcccagcaccacctgtggcaggaccgtcagtcttcctcttccccccaaaacccaaggacaccctcatgatctcccggacccctgaggtcacgtgcgtggtggtggacgtgagccacgaagaccccgaggtccagttcaactggtacgtggacggcgtggaggtgcataatgccaagacaaagccacgggaggagcagttcaacagcacgttccgtgtggtcagcgtcctcaccgttgtgcaccaggactggctgaacggcaaggagtacaagtgcaaggtctccaacaaaggcctcccagcccccatcgagaaaaccatctccaaaaccaaagggcagccccgagaaccacaggtgtacaccctgcccccatcccgggaggagatgaccaagaaccaggtcagcctgacctgcctggtcaaaggcttctaccccagcgacatcgccgtggagtgggagagcaatgggcagccggagaacaactacaagaccacacctcccatgctggactccgacggctccttcttcctctacagcaagctcaccgtggacaagagcaggtggcagcaggggaacgtcttctcatgctccgtgatgcatgaggctctgcacaaccactacacgcagaagagcctctccctgtctccgggtaaa

SEQ ID NO: 528 - protein, 326 aa, Homo Sapiens
ASTKGPSVFPLAPCSRSTSESTAALGCLVKDYFPEPVTVSWNSGALTSGVHTFPAVLQSSGLYSLSSVVTVPSSNFGTQTYTCNVDHKPSNTKVDKTVERKCCVECPPCPAPPVAGPSVFLFPPKPKDTLMISRTPEVTCVVVDVSHEDPEVQFNWYVDGVEVHNAKTKPREEQFNSTFRVVSVLTVVHQDWLNGKEYKCKVSNKGLPAPIEKTISKTKGQPREPQVYTLPPSREEMTKNQVSLTCLVKGFYPSDIAVEWESNGQPENNYKTTPPMLDSDGSFFLYSKLTVDKSRWQQGNVFSCSVMHEALHNHYTQKSLSLSPGK

SEQ ID NO: 529 - DNA, 978 bp, Homo Sapiens
gcctccaccaagggcccatcggtcttccccctggcgccctgctccaggagcacctccgagagcacagcggccctgggctgcctggtcaaggactacttccccgaaccggtgacggtgtcgtggaactcaggcgctctgaccagcggcgtgcacaccttcccggctgtcctacagtcctcaggactctactccctcagcagcgtggtgaccgtgacctccagcaacttcggcacccagacctacacctgcaacgtagatcacaagcccagcaacaccaaggtggacaagacagttgagcgcaaatgttgtgtcgagtgcccaccgtgcccagcaccacctgtggcaggaccgtcagtcttcctcttccccccaaaacccaaggacaccctcatgatctcccggacccctgaggtcacgtgcgtggtggtggacgtgagccacgaagaccccgaggtccagttcaactggtacgtggacggcatggaggtgcataatgccaagacaaagccacgggaggagcagttcaacagcacgttccgtgtggtcagcgtcctcaccgtcgtgcaccaggactggctgaacggcaaggagtacaagtgcaaggtctccaacaaaggcctcccagcccccatcgagaaaaccatctccaaaaccaaagggcagccccgagaaccacaggtgtacaccctgcccccatcccgggaggagatgaccaagaaccaggtcagcctgacctgcctggtcaaaggcttctaccccagcgacatcgccgtggagtgggagagcaatgggcagccggagaacaactacaagaccacacctcccatgctggactccgacggctccttcttcctctacagcaagctcaccgtggacaagagcaggtggcagcaggggaacgtcttctcatgctccgtgatgcatgaggctctgcacaaccactacacacagaagagcctctccctgtctccgggtaaa

SEQ ID NO: 530 - protein, 326 aa, Homo Sapiens
ASTKGPSVFPLAPCSRSTSESTAALGCLVKDYFPEPVTVSWNSGALTSGVHTFPAVLQSSGLYSLSSVVTVTSSNFGTQTYTCNVDHKPSNTKVDKTVERKCCVECPPCPAPPVAGPSVFLFPPKPKDTLMISRTPEVTCVVVDVSHEDPEVQFNWYVDGMEVHNAKTKPREEQFNSTFRVVSVLTVVHQDWLNGKEYKCKVSNKGLPAPIEKTISKTKGQPREPQVYTLPPSREEMTKNQVSLTCLVKGFYPSDIAVEWESNGQPENNYKTTPPMLDSDGSFFLYSKLTVDKSRWQQGNVFSCSVMHEALHNHYTQKSLSLSPGK

SEQ ID NO: 531 - DNA, 978 bp, Homo Sapiens
gcctccaccaagggcccatcggtcttccccctggcgccctgctccaggagcacctccgagagcacagcggccctgggctgcctggtcaaggactacttccccgaaccggtgacggtgtcgtggaactcaggcgctctgaccagcggcgtgcacaccttcccagctgtcctacagtcctcaggactctactccctcagcagcgtggtgaccgtgccctccagcagcttgggcacccagacctacacctgcaacgtagatcacaagcccagcaacaccaaggtggacaagacagttgagcgcaaatgttgtgtcgagtgcccaccgtgcccagcaccacctgtggcaggaccgtcagtcttcctcttccccccaaaacccaaggacaccctcatgatctcccggacccctgaggtcacgtgcgtggtggtggacgtgagccacgaagaccccgaggtccagttcaactggtacgtggacggcgtggaggtgcataatgccaagacaaagccacgggaggagcagttcaacagcacgttccgtgtggtcagcgtcctcaccgttgtgcaccaggactggctgaacggcaaggagtacaagtgcaaggtctccaacaaaggcctcccagcccccatcgagaaaaccatctccaaaaccaaagggcagccccgagaaccacaggtgtacaccctgcccccatcccgggaggagatgaccaagaaccaggtcagcctgacctgcctggtcaaaggcttctaccccagcgacatcgccgtggagtgggagagcaatgggcagccggagaacaactacaagaccacacctcccatgctggactccgacggctccttcttcctctacagcaagctcaccgtggacaagagcaggtggcagcaggggaacgtcttctcatgctccgtgatgcatgaggctctgcacaaccactacacgcagaagagcctctccctgtctccgggtaaa

SEQ ID NO: 532 - protein, 326 aa, Homo Sapiens
ASTKGPSVFPLAPCSRSTSESTAALGCLVKDYFPEPVTVSWNSGALTSGVHTFPAVLQSSGLYSLSSVVTVPSSSLGTQTYTCNVDHKPSNTKVDKTVERKCCVECPPCPAPPVAGPSVFLFPPKPKDTLMISRTPEVTCVVVDVSHEDPEVQFNWYVDGVEVHNAKTKPREEQFNSTFRVVSVLTVVHQDWLNGKEYKCKVSNKGLPAPIEKTISKTKGQPREPQVYTLPPSREEMTKNQVSLTCLVKGFYPSDIAVEWESNGQPENNYKTTPPMLDSDGSFFLYSKLTVDKSRWQQGNVFSCSVMHEALHNHYTQKSLSLSPGK

SEQ ID NO: 533 - DNA, 978 bp, Homo Sapiens
gcctccaccaagggcccatcggtcttccccctggcgccctgctccaggagcacctccgagagcacagcggccctgggctgcctggtcaaggactacttccccgaaccggtgacggtgtcgtggaactcaggcgctctgaccagcggcgtgcacaccttcccggctgtcctacagtcctcaggactctactccctcagcagcgtggtgaccgtgccctccagcaacttcggcacccagacctacacctgcaacgtagatcacaagcccagcaacaccaaggtggacaagacagttgagcgcaaatgttgtgtcgagtgcccaccgtgcccagcaccacctgtggcaggaccgtcagtcttcctcttccccccaaaacccaaggacaccctcatgatctcccggacccctgaggtcacgtgcgtggtggtggacgtgagccacgaagaccccgaggtccagttcaactggtacgtggacggcgtggaggtgcataatgccaagacaaagccacgggaggagcagttcaacagcacgttccgtgtggtcagcgtcctcaccgtcgtgcaccaggactggctgaacggcaaggagtacaagtgcaaggtctccaacaaaggcctcccagcccccatcgagaaaaccatctccaaaaccaaagggcagccccgagaaccacaggtgtacaccctgcccccatcccgggaggagatgaccaagaaccaggtcagcctgacctgcctggtcaaaggcttctaccccagcgacatctccgtggagtgggagagcaatgggcagccggagaacaactacaagaccacacctcccatgctggactccgacggctccttcttcctctacagcaagctcaccgtggacaagagcaggtggcagcaggggaacgtcttctcatgctccgtgatgcatgaggctctgcacaaccactacacacagaagagcctctccctgtctccgggtaaa

SEQ ID NO: 534 - protein, 326 aa, Homo Sapiens
ASTKGPSVFPLAPCSRSTSESTAALGCLVKDYFPEPVTVSWNSGALTSGVHTFPAVLQSSGLYSLSSVVTVPSSNFGTQTYTCNVDHKPSNTKVDKTVERKCCVECPPCPAPPVAGPSVFLFPPKPKDTLMISRTPEVTCVVVDVSHEDPEVQFNWYVDGVEVHNAKTKPREEQFNSTFRVVSVLTVVHQDWLNGKEYKCKVSNKGLPAPIEKTISKTKGQPREPQVYTLPPSREEMTKNQVSLTCLVKGFYPSDISVEWESNGQPENNYKTTPPMLDSDGSFFLYSKLTVDKSRWQQGNVFSCSVMHEALHNHYTQKSLSLSPGK

SEQ ID NO: 535 - DNA, 318 bp, Homo Sapiens
ggtcagcccaaggctgccccctcggtcactctgttcccaccctcctctgaggagcttcaagccaacaaggccacactggtgtgtctcgtaagtgacttcaacccgggagccgtgacagtggcctggaaggcagatggcagccccgtcaaggtgggagtggagaccaccaaaccctccaaacaaagcaacaacaagtatgcggccagcagctacctgagcctgacgcccgagcagtggaagtcccacagaagctacagctgccgggtcacgcatgaagggagcaccgtggagaagacagtggcccctgcagaatgctct

SEQ ID NO: 536 - protein, 106 aa, Homo Sapiens
GQPKAAPSVTLFPPSSEELQANKATLVCLVSDFNPGAVTVAWKADGSPVKVGVETTKPSKQSNNKYAASSYLSLTPEQWKSHRSYSCRVTHEGSTVEKTVAPAECS

SEQ ID NO: 537 - DNA, 990 bp, Homo Sapiens
gcctccaccaagggcccatcggtcttccccctggcaccctcctccaagagcacctctgggggcacagcggccctgggctgcctggtcaaggactacttccccgaaccggtgacggtgtcgtggaactcaggcgccctgaccagcggcgtgcacaccttcccggctgtcctacagtcctcaggactctactccctcagcagcgtggtgaccgtgccctccagcagcttgggcacccagacctacatctgcaacgtgaatcacaagcccagcaacaccaaggtggacaagaaagttgagcccaaatcttgtgacaaaactcacacatgcccaccgtgcccagcacctgaactcctggggggaccgtcagtcttcctcttccccccaaaacccaaggacaccctcatgatctcccggacccctgaggtcacatgcgtggtggtggacgtgagccacgaagaccctgaggtcaagttcaactggtacgtggacggcgtggaggtgcataatgccaagacaaagccgcgggaggagcagtacaacagcacgtaccgggtggtcagcgtcctcaccgtcctgcaccaggactggctgaatggcaaggagtacaagtgcaaggtctccaacaaagccctcccagcccccatcgagaaaaccatctccaaagccaaagggcagccccgagaaccacaggtgtacaccctgcccccatcccgggatgagctgaccaagaaccaggtcagcctgacctgcctggtcaaaggcttctatcccagcgacatcgccgtggagtgggagagcaatgggcagccggagaacaactacaagaccacgcctcccgtgctggactccgacggctccttcttcctctacagcaagctcaccgtggacaagagcaggtggcagcaggggaacgtcttctcatgctccgtgatgcatgaggctctgcacaaccactacacgcagaagagcctctccctgtctccgggtaaa

SEQ ID NO: 538 - protein, 106 aa, Homo Sapiens; identical to SEQ ID NO: 225

SEQ ID NO: 539 - protein, 663 aa, Homo Sapiens
DIQMTQSPASLSASLGETVTIQCRASEDIYSGLAWFQQKPGKSPQLLIYGASSLQDGVPSRFSGSGSGTQYSLKISSMQTEDEGVYFCQQGLKYPPTFGSGTKLEIKRTVAAPSVFIFPPSDEQLKSGTASVVCLLNNFYPREAKVQWKVDNALQSGNSQESVTEQDSKDSTYSLSSTLTLSKADYEKHKVYACEVTHQGLSSPVTKSFNRGECEVQLVESGGGLTQPGKSLKLSCEASGFTFSSFTMHWVRQSPGKGLEWVAFIRSGSGIVFYADAVRGRFTISRDNAKNLLFLQMNDLKSEDTAMYYCARRPLGHNTFDSWGQGTLVTVSSASTKGPSVFPLAPSSKSTSGGTAALGCLVKDYFPEPVTVSWNSGALTSGVHTFPAVLQSSGLYSLSSVVTVPSSSLGTQTYICNVNHKPSNTKVDKKVEPKSCDKTHTCPPCPAPELLGGPSVFLFPPKPKDTLMISRTPEVTCVVVDVSHEDPEVKFNWYVDGVEVHNAKTKPREEQYNSTYRVVSVLTVLHQDWLNGKEYKCKVSNKALPAPIEKTISKAKGQPREPQVYTLPPSRDELTKNQVSLTCLVKGFYPSDIAVEWESNGQPENNYKTTPPVLDSDGSFFLYSKLTVDKSRWQQGNVFSCSVMHEALHNHYTQKSLSLSPGK

SEQ ID NO: 540 - protein, 215 aa, Homo Sapiens
EVQLVESGGGLVQPGRSLKLSCAASGFTFSDFYMAWVRQAPKKGLEWVASISYEGSSTYYGDSVMGRFTISRDNAKSTLYLQMNSLRSEDTATYYCARQREANWEDWGQGVMVTVSSASTKGPSVFPLAPSSKSTSGGTAALGCLVKDYFPEPVTVSWNSGALTSGVHTFPAVLQSSGLYSLSSVVTVPSSSLGTQTYICNVNHKPSNTKVDKKV

SEQ ID NO: 541 - protein, 220 aa, Homo Sapiens
DIVMTQSPSSLAVSPGEKVTMTCKSSQSLYYSGVKENLLAWYQQKPGQSPKLLIYYASIRFTGVPDRFTGSGSGTDYTLTITSVQAEDMGQYFCQQGINNPLTFGDGTKLEIKRTVAAPSVFIFPPSDEQLKSGTASVVCLLNNFYPREAKVQWKVDNALQSGNSQESVTEQDSKDSTYSLSSTLTLSKADYEKHKVYACEVTHQGLSSPVTKSFNRGEC

SEQ ID NO: 542 - protein, 667 aa, Homo Sapiens
DIVMTQSPSSLAVSPGEKVTMTCKSSQSLYYSGVKENLLAWYQQKPGQSPKLLIYYASIRFTGVPDRFTGSGSGTDYTLTITSVQAEDMGQYFCQQGINNPLTFGDGTKLEIKRTVAAPSVFIFPPSDEQLKSGTASVVCLLNNFYPREAKVQWKVDNALQSGNSQESVTEQDSKDSTYSLSSTLTLSKADYEKHKVYACEVTHQGLSSPVTKSFNRGECEVQLVESGGGLVQPGRSLKLSCAASGFTFSDFYMAWVRQAPKKGLEWVASISYEGSSTYYGDSVMGRFTISRDNAKSTLYLQMNSLRSEDTATYYCARQREANWEDWGQGVMVTVSSASTKGPSVFPLAPSSKSTSGGTAALGCLVKDYFPEPVTVSWNSGALTSGVHTFPAVLQSSGLYSLSSVVTVPSSSLGTQTYICNVNHKPSNTKVDKKVEPKSCDKTHTCPPCPAPELLGGPSVFLFPPKPKDTLMISRTPEVTCVVVDVSHEDPEVKFNWYVDGVEVHNAKTKPREEQYNSTYRVVSVLTVLHQDWLNGKEYKCKVSNKALPAPIEKTISKAKGQPREPQVYTLPPSRDELTKNQVSLTCLVKGFYPSDIAVEWESNGQPENNYKTTPPVLDSDGSFFLYSKLTVDKSRWQQGNVFSCSVMHEALHNHYTQKSLSLSPGK

SEQ ID NO: 543 - protein, 217 aa, Homo Sapiens
EVQLVESGGGLTQPGKSLKLSCEASGFTFSSFTMHWVRQSPGKGLEWVAFIRSGSGIVFYADAVRGRFTISRDNAKNLLFLQMNDLKSEDTAMYYCARRPLGHNTFDSWGQGTLVTVSSASTKGPSVFPLAPSSKSTSGGTAALGCLVKDYFPEPVTVSWNSGALTSGVHTFPAVLQSSGLYSLSSVVTVPSSSLGTQTYICNVNHKPSNTKVDKKV

SEQ ID NO: 544 - protein, 214 aa, Homo Sapiens
DIQMTQSPASLSASLGETVTIQCRASEDIYSGLAWFQQKPGKSPQLLIYGASSLQDGVPSRFSGSGSGTQYSLKISSMQTEDEGVYFCQQGLKYPPTFGSGTKLEIKRTVAAPSVFIFPPSDEQLKSGTASVVCLLNNFYPREAKVQWKVDNALQSGNSQESVTEQDSKDSTYSLSSTLTLSKADYEKHKVYACEVTHQGLSSPVTKSFNRGEC

SEQ ID NO: 545 - protein, 663 aa, Homo Sapiens
DIQMTQSPASLSASLGETVTIQCRASEDIYSGLAWFQQKPGKSPQLLIYGASSLQDGVPSRFSGSGSGTQYSLKISSMQTEDEGVYFCQQGLKYPPTFGSGTKLEIKRTDAAPTVSIFPPSSEQLTSGGASVVCFLNNFYPKDINVKWKIDGSERQNGVLNSWTDQDSKDSTYSMSSTLTLTKDEYERHNSYTCEATHKTSTSPIVKSFNRNECEVQLVESGGGLTQPGKSLKLSCEASGFTFSSFTMHWVRQSPGKGLEWVAFIRSGSGIVFYADAVRGRFTISRDNAKNLLFLQMNDLKSEDTAMYYCARRPLGHNTFDSWGQGTLVTVSSAKTTAPSVYPLAPVCGDTTGSSVTLGCLVKGYFPEPVTLTWNSGSLSSGVHTFPAVLQSDLYTLSSSVTVTSSTWPSQSITCNVAHPASSTKVDKKIEPRGPTIKPCPPCKCPAPNLLGGPSVFIFPPKIKDVLMISLSPIVTCVVVDVSEDDPDVQISWFVNNVEVHTAQTQTHREDYNSTLRVVSALPIQHQDWMSGKEFKCKVNNKDLPAPIERTISKPKGSVRAPQVYVLPPPEEEMTKKQVTLTCMVTDFMPEDIYVEWTNNGKTELNYKNTEPVLDSDGSYFMYSKLRVEKKNWVERNSYSCSVVHEGLHNHHTTKSFSRTPGK

SEQ ID NO: 546 - protein, 214 aa, Homo Sapiens
EVQLVESGGGLVQPGRSLKLSCAASGFTFSDFYMAWVRQAPKKGLEWVASISYEGSSTYYGDSVMGRFTISRDNAKSTLYLQMNSLRSEDTATYYCARQREANWEDWGQGVMVTVSSAKTTAPSVYPLAPVCGDTTGSSVTLGCLVKGYFPEPVTLTWNSGSLSSGVHTFPAVLQSDLYTLSSSVTVTSSTWPSQSITCNVAHPASSTKVDKKI

SEQ ID NO: 547 - protein, 220 aa, Homo Sapiens
DIVMTQSPSSLAVSPGEKVTMTCKSSQSLYYSGVKENLLAWYQQKPGQSPKLLIYYASIRFTGVPDRFTGSGSGTDYTLTITSVQAEDMGQYFCQQGINNPLTFGDGTKLEIKRTDAAPTVSIFPPSSEQLTSGGASVVCFLNNFYPKDINVKWKIDGSERQNGVLNSWTDQDSKDSTYSMSSTLTLTKDEYERHNSYTCEATHKTSTSPIVKSFNRNEC

SEQ ID NO: 548 - protein, 667 aa, Homo Sapiens
DIVMTQSPSSLAVSPGEKVTMTCKSSQSLYYSGVKENLLAWYQQKPGQSPKLLIYYASIRFTGVPDRFTGSGSGTDYTLTITSVQAEDMGQYFCQQGINNPLTFGDGTKLEIKRTDAAPTVSIFPPSSEQLTSGGASVVCFLNNFYPKDINVKWKIDGSERQNGVLNSWTDQDSKDSTYSMSSTLTLTKDEYERHNSYTCEATHKTSTSPIVKSFNRNECEVQLVESGGGLVQPGRSLKLSCAASGFTFSDFYMAWVRQAPKKGLEWVASISYEGSSTYYGDSVMGRFTISRDNAKSTLYLQMNSLRSEDTATYYCARQREANWEDWGQGVMVTVSSAKTTAPSVYPLAPVCGDTTGSSVTLGCLVKGYFPEPVTLTWNSGSLSSGVHTFPAVLQSDLYTLSSSVTVTSSTWPSQSITCNVAHPASSTKVDKKIEPRGPTIKPCPPCKCPAPNLLGGPSVFIFPPKIKDVLMISLSPIVTCVVVDVSEDDPDVQISWFVNNVEVHTAQTQTHREDYNSTLRVVSALPIQHQDWMSGKEFKCKVNNKDLPAPIERTISKPKGSVRAPQVYVLPPPEEEMTKKQVTLTCMVTDFMPEDIYVEWTNNGKTELNYKNTEPVLDSDGSYFMYSKLRVEKKNWVERNSYSCSVVHEGLHNHHTTKSFSRTPGK

SEQ ID NO: 549 - protein, 216 aa, Homo Sapiens
EVQLVESGGGLTQPGKSLKLSCEASGFTFSSFTMHWVRQSPGKGLEWVAFIRSGSGIVFYADAVRGRFTISRDNAKNLLFLQMNDLKSEDTAMYYCARRPLGHNTFDSWGQGTLVTVSSAKTTAPSVYPLAPVCGDTTGSSVTLGCLVKGYFPEPVTLTWNSGSLSSGVHTFPAVLQSDLYTLSSSVTVTSSTWPSQSITCNVAHPASSTKVDKKI

SEQ ID NO: 550 - protein, 214 aa, Homo Sapiens
DIQMTQSPASLSASLGETVTIQCRASEDIYSGLAWFQQKPGKSPQLLIYGASSLQDGVPSRFSGSGSGTQYSLKISSMQTEDEGVYFCQQGLKYPPTFGSGTKLEIKRTDAAPTVSIFPPSSEQLTSGGASVVCFLNNFYPKDINVKWKIDGSERQNGVLNSWTDQDSKDSTYSMSSTLTLTKDEYERHNSYTCEATHKTSTSPIVKSFNRNEC

SEQ ID NO: 551 - protein, 659 aa, Homo Sapiens
DIQMTQSPASLSASLGETVTIQCRASEDIYSGLAWFQQKPGKSPQLLIYGASSLQDGVPSRFSGSGSGTQYSLKISSMQTEDEGVYFCQQGLKYPPTFGSGTKLEIKRTVAAPSVFIFPPSDEQLKSGTASVVCLLNNFYPREAKVQWKVDNALQSGNSQESVTEQDSKDSTYSLSSTLTLSKADYEKHKVYACEVTHQGLSSPVTKSFNRGECEVQLVESGGGLTQPGKSLKLSCEASGFTFSSFTMHWVRQSPGKGLEWVAFIRSGSGIVFYADAVRGRFTISRDNAKNLLFLQMNDLKSEDTAMYYCARRPLGHNTFDSWGQGTLVTVSSASTKGPSVFPLAPSSKSTSGGTAALGCLVKDYFPEPVTVSWNSGALTSGVHTFPAVLQSSGLYSLSSVVTVPSSSLGTQTYICNVNHKPSNTKVDKKVEPKSCDKTHTCPPNLLGGPSVFIFPPKIKDVLMISLSPIVTCVVVDVSEDDPDVQISWFVNNVEVHTAQTQTHREDYNSTLRVVSALPIQHQDWMSGKEFKCKVNNKDLPAPIERTISKPKGSVRAPQVYVLPPPEEEMTKKQVTLTCMVTDFMPEDIYVEWTNNGKTELNYKNTEPVLDSDGSYFMYSKLRVEKKNWVERNSYSCSVVHEGLHNHHTTKSFSRTPGK

SEQ ID NO: 552 - protein, 215 aa, Homo Sapiens; identical to SEQ ID NO: 540

SEQ ID NO: 553 - protein, 220 aa, Homo Sapiens; identical to SEQ ID NO: 541

SEQ ID NO: 554 - protein, 663 aa, Homo Sapiens
DIVMTQSPSSLAVSPGEKVTMTCKSSQSLYYSGVKENLLAWYQQKPGQSPKLLIYYASIRFTGVPDRFTGSGSGTDYTLTITSVQAEDMGQYFCQQGINNPLTFGDGTKLEIKRTVAAPSVFIFPPSDEQLKSGTASVVCLLNNFYPREAKVQWKVDNALQSGNSQESVTEQDSKDSTYSLSSTLTLSKADYEKHKVYACEVTHQGLSSPVTKSFNRGECEVQLVESGGGLVQPGRSLKLSCAASGFTFSDFYMAWVRQAPKKGLEWVASISYEGSSTYYGDSVMGRFTISRDNAKSTLYLQMNSLRSEDTATYYCARQREANWEDWGQGVMVTVSSASTKGPSVFPLAPSSKSTSGGTAALGCLVKDYFPEPVTVSWNSGALTSGVHTFPAVLQSSGLYSLSSVVTVPSSSLGTQTYICNVNHKPSNTKVDKKVEPKSCDKTHTCPPNLLGGPSVFIFPPKIKDVLMISLSPIVTCVVVDVSEDDPDVQISWFVNNVEVHTAQTQTHREDYNSTLRVVSALPIQHQDWMSGKEFKCKVNNKDLPAPIERTISKPKGSVRAPQVYVLPPPEEEMTKKQVTLTCMVTDFMPEDIYVEWTNNGKTELNYKNTEPVLDSDGSYFMYSKLRVEKKNWVERNSYSCSVVHEGLHNHHTTKSFSRTPGK

SEQ ID NO: 555 - protein, 217 aa, Homo Sapiens; identical to SEQ ID NO: 543

SEQ ID NO: 556 - protein, 214 aa, Homo Sapiens; identical to SEQ ID NO: 544

SEQ ID NO: 557 - protein, 659 aa, Homo Sapiens; identical to SEQ ID NO: 551

SEQ ID NO: 558 - protein, 215 aa, Homo Sapiens; identical to SEQ ID NO: 540

SEQ ID NO: 559 - protein, 220 aa, Homo Sapiens; identical to SEQ ID NO: 541

SEQ ID NO: 560 - protein, 663 aa, Homo Sapiens; identical to SEQ ID NO: 554

SEQ ID NO: 561 - protein, 217 aa, Homo Sapiens; identical to SEQ ID NO: 543

SEQ ID NO: 562 - protein, 214 aa, Homo Sapiens; identical to SEQ ID NO: 544

SEQ ID NO: 563 - DNA, 364 bp, Homo Sapiens
caggttcaactgatgcagtctggaactgaggtgaagaagcctggggcctcagtgaaggtctcctgcaagacttctggttacacctttaccacctatggtatcacttgggtgcgacaggcccctggacaagggcttgagtggatgggatggatcagcgcttacagtggtgacacagactatgcacagaagttccagggcagagtcaccgtgacaacagacacatccacgaacacagcctacatggagttgaggagcctgaaatctgacgacacggccgtgtattattgtgcgagaagtagtggctggccccaccactacggtatggacgtctggggccaagggaccacggtcaccgtctcctcag

SEQ ID NO: 564 - protein, 121 aa, Homo Sapiens
QVQLMQSGTEVKKPGASVKVSCKTSGYTFTTYGITWVRQAPGQGLEWMGWISAYSGDTDYAQKFQGRVTVTTDTSTNTAYMELRSLKSDDTAVYYCARSSGWPHHYGMDVWGQGTTVTVSS

SEQ ID NO: 565 - protein, 8 aa, Homo Sapiens
GYTFTTYG

SEQ ID NO: 566 - protein, 8 aa, Homo Sapiens
ISAYSGDT

SEQ ID NO: 567 - protein, 14 aa, Homo Sapiens
ARSSGWPHHYGMDV

SEQ ID NO: 568 - DNA, 373 bp, Homo Sapiens
caggttcaactggtgcagtctggaggtgaggtgaaaaagcctggggcctcagtgaaggtctcctgcaaggcttctggttacacctttaccagctatggtttcagctgggtgcgacaggcccctggacaaggactagagtggatgggatggatcagcgcttacaatggtaacacaaactatgcacagaagctccagggcagagtctccatgaccacagacacatccacgagcacagcctacatggagctgaggagcttgagatctgacgacacggccgtgtatttctgtgcgcgatctacgtcttactatggttcggggaccctatacggtatggacgtctggggccaagggaccacggtcaccgtctcctcag

SEQ ID NO: 569 - protein, 124 aa, Homo Sapiens
QVQLVQSGGEVKKPGASVKVSCKASGYTFTSYGFSWVRQAPGQGLEWMGWISAYNGNTNYAQKLQGRVSMTTDTSTSTAYMELRSLRSDDTAVYFCARSTSYYGSGTLYGMDVWGQGTTVTVSS

SEQ ID NO: 570 - protein, 17 aa, Homo Sapiens
ARSTSYYGSGTLYGMDV

SEQ ID NO: 571 - DNA, 373 bp, Homo Sapiens
caggttcaactggtgcagtctggaggtgaggtgaagaagcctggggcctcagtgaaggtctcctgcaaggcttctggttacacctttaccagctatggtttcagctgggtgcgacaggcccctggacaaggactagagtggatgggatggatcagcgcttacaatggtaacacaaactatgcacagaagctccagggcagagtctccatgaccacagacacatccacgagcacagcctacatggagctgaggagcttgagatctgacgacacggccgtgtattactgtgcgcgatctacgtcttactatggttcggggaccctctacggtatggacgtctggggccaagggaccacggtcaccgtctcctcag

SEQ ID NO: 572 - protein, 124 aa, Homo Sapiens
QVQLVQSGGEVKKPGASVKVSCKASGYTFTSYGFSWVRQAPGQGLEWMGWISAYNGNTNYAQKLQGRVSMTTDTSTSTAYMELRSLRSDDTAVYYCARSTSYYGSGTLYGMDVWGQGTTVTVSS

SEQ ID NO: 573 - DNA, 373 bp, Homo Sapiens; identical to SEQ ID NO: 568

SEQ ID NO: 574 - protein, 124 aa, Homo Sapiens; identical to SEQ ID NO: 569

SEQ ID NO: 575 - DNA, 373 bp, Homo Sapiens
caggttcaactggtgcagtctggaggtgaggtgaaaaagcctcgggcctcagtgaaggtctcctgcaaggcttctggttacacctttaccagctatgtgttcagctgggtgcgacatgccgctggacaaggactagagtggatgggatggatcagcggttacaatggtaacacaaactatgcacagaagctccagtgcggagtctcgatgaccgcagacacatccacgagcacagcctacatggagctgaggagcttgagatctgacgacacggccgtgtatttctgtgcgcgatctacgtcttactatggtgcggggaccctatacggtatggacgtctggggccaagggaccacggtcaccgtctcctcag

SEQ ID NO: 576 - protein, 124 aa, Homo Sapiens
QVQLVQSGGEVKKPRASVKVSCKASGYTFTSYVFSWVRHAAGQGLEWMGWISGYNGNTNYAQKLQCGVSMTADTSTSTAYMELRSLRSDDTAVYFCARSTSYYGAGTLYGMDVWGQGTTVTVSS

SEQ ID NO: 577 - protein, 8 aa, Homo Sapiens
GYTFTSYV

SEQ ID NO: 578 - protein, 8 aa, Homo Sapiens
ISGYNGNT

SEQ ID NO: 579 - protein, 17 aa, Homo Sapiens
ARSTSYYGAGTLYGMDV

SEQ ID NO: 580 - DNA, 373 bp, Homo Sapiens
gaggtgcagctggtggagtctgggggaggtgtggtacggcctggggggtccctgagactctcctgtgcagcctctggattcacctttgatgattatggcatgagctgggtccgccaagctccagggaaggggctggagtgggtctctggtattaattggaatggtggtagcacaggttatgcagactctgtgaagggccgattcaccatctccagagacaacgccaagaactccctgtatctgcaaatgaacagtctgagagccgaggacacggccttgtattactgtgcggccgattactatggttcggggagttattataacgtcccctttgactactggggccagggaaccctggtcaccgtctcctcag

SEQ ID NO: 581 - protein, 124 aa, Homo Sapiens
EVQLVESGGGVVRPGGSLRLSCAASGFTFDDYGMSWVRQAPGKGLEWVSGINWNGGSTGYADSVKGRFTISRDNAKNSLYLQMNSLRAEDTALYYCAADYYGSGSYYNVPFDYWGQGTLVTVSS

SEQ ID NO: 582 - protein, 8 aa, Homo Sapiens
GFTFDDYG

SEQ ID NO: 583 - protein, 8 aa, Homo Sapiens
INWNGGST

SEQ ID NO: 584 - protein, 17 aa, Homo Sapiens
AADYYGSGSYYNVPFDY

SEQ ID NO: 585 - DNA, 373 bp, Homo Sapiens
gaggtgcagctggtggagtctgggggaggtgtgatacggcctggggggtccctgagactctcctgtgcagcctctggattcacctttgatgattatggcatgagctgggtccgccaagctccagggaaggggctggagtgggtctctggtattaattggattggtgataacacagattatgcagactctgtgaagggccgattcaccatctccagagacaacgccaagaactccctatatctgcaaatgaacagtctgagagccgaggacacggccttgtattactgtgcgagagattactttggttcggggagttattataacgttccctttgactactggggccagggaaccctggtcaccgtctcctcag

SEQ ID NO: 586 - protein, 124 aa, Homo Sapiens
EVQLVESGGGVIRPGGSLRLSCAASGFTFDDYGMSWVRQAPGKGLEWVSGINWIGDNTDYADSVKGRFTISRDNAKNSLYLQMNSLRAEDTALYYCARDYFGSGSYYNVPFDYWGQGTLVTVSS

SEQ ID NO: 587 - protein, 8 aa, Homo Sapiens
INWIGDNT

SEQ ID NO: 588 - protein, 17 aa, Homo Sapiens
ARDYFGSGSYYNVPFDY

SEQ ID NO: 589 - DNA, 337 bp, Homo Sapiens
gatattgtgatgactcagtctccactctccctgcccgtcacccctggagagccggcctccatctcctgcaggtctagtcagagcctcctgcatagtaatggattcaactatttcgattggtacctgcagaagccaggacagtctccacagctcctgatctttttggtttctaatcgggcctccggggtccctgacaggttcagtggcagtggatcaggcacagattttacactgaaaatcagcagagtggaggctgaggatgttgggatttattactgcatgcaagctctacaaactccgctcactttcggcggagggaccaaggtggagatcaaac

SEQ ID NO: 590 - protein, 112 aa, Homo Sapiens
DIVMTQSPLSLPVTPGEPASISCRSSQSLLHSNGFNYFDWYLQKPGQSPQLLIFLVSNRASGVPDRFSGSGSGTDFTLKISRVEAEDVGIYYCMQALQTPLTFGGGTKVEIK

SEQ ID NO: 591 - protein, 11 aa, Homo Sapiens
QSLLHSNGFNY

SEQ ID NO: 592 - protein, 3 aa, Homo Sapiens
LVS

SEQ ID NO: 593 - protein, 9 aa, Homo Sapiens
MQALQTPLT

SEQ ID NO: 594 - DNA, 337 bp, Homo Sapiens
gatattgtgatgactcagtctccactctccctgcccgtcacccctggagagccggcctccatctcctgcaggtctagtcagagcctcctgcatagtaatggatacaactgtttggattggtacctgcagaagccagggcagtctccacagctcctgatctatttgggttctactcgggcctccgggttccctgacaggttcagtggcagtggatcaggcacagattttacactgaaaatcagcagagtggaggctgaggatgttggggtttattactgcatgcaagctctacaaactccgtgcagttttggccaggggaccaagctggagatcaaac

SEQ ID NO: 595 - protein, 112 aa, Homo Sapiens
DIVMTQSPLSLPVTPGEPASISCRSSQSLLHSNGYNCLDWYLQKPGQSPQLLIYLGSTRASGFPDRFSGSGSGTDFTLKISRVEAEDVGVYYCMQALQTPCSFGQGTKLEIK

SEQ ID NO: 596 - protein, 11 aa, Homo Sapiens
QSLLHSNGYNC

SEQ ID NO: 597 - DNA, 337 bp, Homo Sapiens; identical to SEQ ID NO: 594

SEQ ID NO: 598 - protein, 112 aa, Homo Sapiens; identical to SEQ ID NO: 595

SEQ ID NO: 599 - DNA, 337 bp, Homo Sapiens
gatattgtgatgactcagtctccactctccctgcccgtcacccctggagagccggcctccatctcctgcaggtctagtcagagcctcctgcatagtaatggatacaactgtttggattggtacctgcagaagccagggcagtctccacagctcctgatctatttgggttctactcgggcctccgggttccctgacaggttcagtggcagtggatcaggcacagattctacactgaaaatcagcagagtggaggctgaggatgttggggtttattactgcatgcaagctctacaaactccgtgcagttttggccaggggaccaagctggagatcaaac

SEQ ID NO: 600 - protein, 112 aa, Homo Sapiens
DIVMTQSPLSLPVTPGEPASISCRSSQSLLHSNGYNCLDWYLQKPGQSPQLLIYLGSTRASGFPDRFSGSGSGTDSTLKISRVEAEDVGVYYCMQALQTPCSFGQGTKLEIK

SEQ ID NO: 601 - DNA, 337 bp, Homo Sapiens; identical to SEQ ID NO: 594

SEQ ID NO: 602 - protein, 112 aa, Homo Sapiens; identical to SEQ ID NO: 595

SEQ ID NO: 603 - DNA, 325 bp, Homo Sapiens
gaaattgtgttgacgcagtctccaggcaccctgtctttgtctccaggggaaagagccaccctctcctgcagggccagtcagagtgttagcagcagctacttagcctggtaccagcagaaacctggccaggctcccaggctcctcatctatggtgcatccagcagggccactggcatcccagacaggttcagtggcagtgggtctgggacagacttcactctcaccatcagcagactggagcctgaagattttgcagtgtattactgtcagcagtatggtagctcacctttcactttcggccctgggaccaaagtggatatcaaac

SEQ ID NO: 604 - protein, 108 aa, Homo Sapiens
EIVLTQSPGTLSLSPGERATLSCRASQSVSSSYLAWYQQKPGQAPRLLIYGASSRATGIPDRFSGSGSGTDFTLTISRLEPEDFAVYYCQQYGSSPFTFGPGTKVDIK

SEQ ID NO: 605 - protein, 9 aa, Homo Sapiens
QQYGSSPFT

SEQ ID NO: 606 - DNA, 325 bp, Homo Sapiens
gaaattgtgttgacgcagtctccaggcaccctgtctttgtctccaggggaaagagccaccctctcctgcagggccagtcagagtgttagcagcagctacttagcctggtaccagcagaaacctggccaggctcccaggctcctcatctatggtgcatccagcagggccactggcatcccagacaggttcagtggcagtgggtctgggacagacttcactctcaccatcagcagactggaacctgaagattttgcagtatattactgtcaccagtatggtaattcaccattcactttcggccctgggaccaaagtggatatcaaac

SEQ ID NO: 607 - protein, 108 aa, Homo Sapiens
EIVLTQSPGTLSLSPGERATLSCRASQSVSSSYLAWYQQKPGQAPRLLIYGASSRATGIPDRFSGSGSGTDFTLTISRLEPEDFAVYYCHQYGNSPFTFGPGTKVDIK

SEQ ID NO: 608 - protein, 9 aa, Homo Sapiens
HQYGNSPFT

SEQ ID NO: 609 - protein, 11 aa, Homo Sapiens
  MISC_FEATURE (1)..(1): X = any amino acid.
  MISC_FEATURE (5)..(5): X = any amino acid.
  MISC_FEATURE (8)..(8): X = any amino acid.
  MISC_FEATURE (9)..(9): X = is either present or absent, and if present, may be any amino acid.
XGSGXYGXXFD

SEQ ID NO: 610 - protein, 478 aa, Artificial Sequence
  ICOSL-Fc fusion protein
DTQEKEVRAMVGSDVELSCACPEGSRFDLNDVYVYWQTSESKTVVTYHIPQNSSLENVDSRYRNRALMSPAGMLRGDFSLRLFNVTPQDEQKFHCLVLSQSLGFQEVLSVEVTLHVAANFSVPVVSAPHSPSQDELTFTCTSINGYPRPNVYWINKTDNSLLDQALQNDTVFLNMRGLYDVVSVLRIARTPSVNIGCCIENVLLQQNLTVGSQTGNDIGERDKITENPVSTGEKNAATWSDIEGRMDPKSCDKTHTCPPCPAPELLGGPSVFLFPPKPKDTLMISRTPEVTCVVVDVSHEDPEVKFNWYVDGVEVHNAKTKPREEQYNSTYRVVSVLTVLHQDWLNGKEYKCKVSNKALPAPIEKTISKAKGQPREPQVYTLPPSRDELTKNQVSLTCLVKGFYPSDIAVEWESNGQPENNYKTTPPVLDSDGSFFLYSKLTVDKSRWQQGNVFSCSVMHEALHNHYTQKSLSLSPGK

SEQ ID NO: 611 - protein, 446 aa, Artificial Sequence
  37A10S713 Heavy Chain
EVQLVESGGGLVQPGGSLRLSCAASGFTFSDYWMDWVRQAPGKGLVWVSNIDEDGSITEYSPFVKGRFTISRDNAKNTLYLQMNSLRAEDTAVYYCTRWGRFGFDSWGQGTLVTVSSASTKGPSVFPLAPSSKSTSGGTAALGCLVKDYFPEPVTVSWNSGALTSGVHTFPAVLQSSGLYSLSSVVTVPSSSLGTQTYICNVNHKPSNTKVDKKVEPKSCDKTHTCPPCPAPELLGGPSVFLFPPKPKDTLMISRTPEVTCVVVDVSHEDPEVKFNWYVDGVEVHNAKTKPREEQYNSTYRVVSVLTVLHQDWLNGKEYKCKVSNKALPAPIEKTISKAKGQPREPQVYTLPPSREEMTKNQVSLTCLVKGFYPSDIAVEWESNGQPENNYKTTPPVLDSDGSFFLYSKLTVDKSRWQQGNVFSCSVMHEALHNHYTQKSLSLSPG

SEQ ID NO: 612 - protein, 218 aa, Artificial Sequence
  37A10S713 Light Chain
DIVMTQSPDSLAVSLGERATINCKSSQSLLSGSFNYLTWYQQKPGQPPKLLIFYASTRHTGVPDRFSGSGSGTDFTLTISSLQAEDVAVYYCHHHYNAPPTFGPGTKVDIKRTVAAPSVFIFPPSDEQLKSGTASVVCLLNNFYPREAKVQWKVDNALQSGNSQESVTEQDSKDSTYSLSSTLTLSKADYEKHKVYACEVTHQGLSSPVTKSFNRGEC

SEQ ID NO: 613 - protein, 453 aa, Artificial Sequence
  XMAb23104 Heavy Chain
QVQLVQSGAEVKKPGASVKVSCKASGYTFTGYYMHWVRQAPGQGLEWMGWINPHSGETIYAQKFQGRVTMTRDTSISTAYMELSSLRSEDTAVYYCARTYYYDTSGYYHDAFDVWGQGTMVTVSSASTKGPSVFPLAPSSKSTSGGTAALGCLVKDYFPEPVTVSWNSGALTSGVHTFPAVLQSSGLYSLSSVVIVPSSSLGTQTYICNVNHKPSDTKVDKKVEPKSCDKTHTCPPCPAPPVAGPSVFLFPPKPKDTLMISRTPEVTCVVVDVKHEDPEVKFNWYVDGVEVHNAKTKPREEEYNSTYRWSVLTVLHQDWLNGKEYKCKVSNKALPAPIEKTISKAKGQPREPQVYTLPPSREEMTKNQVSLTCDVSGFYPSDIAVEWESDGQPENNYKTTPPVLDSDGSFFLYSKLTVDKSRWEQGDVFSCSVLHEALHSHYTQKSLSLSPGK

SEQ ID NO: 614 - protein, 214 aa, Artificial Sequence
  XmAb23104 Light Chain
DIQMTQSPSSVSASVGDRVTITCRASQGISRLLAWYQQKPGKAPKLLIYVASSLQSGVPSRFSGSGSGTDFTLTISSLQPEDFATYYCQQANSFPWTFGQGTKVEIKRTVAAPSVFIFPPSDEQLKSGTASVVCLLNNFYPREAKVQWKVDNALQSGNSQESVTEQDSKDSTYSLSSTLTLSKADYEKHKVYACEVTHQGLSSPVTKSFNRGEC

SEQ ID NO: 615 - protein, 142 aa, Artificial Sequence
  314.8 mAb Heavy Chain Variable Region
MGWRCIILFLVSTATGVHSQVQLQQPGTELMKPGASVKLSCKASGYTFTTYWMHWVKQRPGQGLEWIGEIDPSDSYVNYNQNFKGKATLTVDKSSSTAYIQLSSLTSEDSAVYFCARSPDYYGTSLAWFDYWGQGTLVTVST

SEQ ID NO: 616 - protein, 132 aa, Artificial Sequence
  314.8 mAb Light Chain Variable Region
MRCLAEFLGLLVLWIPGVIGDIVMTQAAPSVPVTPGESVSISCRSSKSPLHSNGNIYLYWFLQRPGQSPQLLIYRMSNLASGVPDRFSGSGSGTTFTLKISRVEAEDVGVYYCMQHLEYPYTFGGGTKLEIK

SEQ ID NO: 617 - protein, 125 aa, Artificial Sequence
  JMab-136 Heavy Chain Variable Region
QVQLVQSGAEVKKPGASVKVSCKASGYTFTGYYMHWVRQAPGQGLEWMGWINPHSGGTNYAQKFQGRVTMTRDTSISTAYMELSRLRSDDTAVYYCARTYYYDSSGYYHDAFDIWGQGTMVTVSS

SEQ ID NO: 618 - protein, 107 aa, Artificial Sequence
  JMab-136 Light Chain Variable Region
DIQMTQSPSSVSASVGDRVTITCRASQGISRLLAWYQQKPGKAPKLLIYVASSLQSGVPSRFSGSGSGTDFTLTISSLQPEDFATYYCQQANSFPWTFGQGTKVEIK

SEQ ID NO: 619 - protein, 450 aa, Artificial Sequence
  ICOS.33 IgGlf S267E heavy chain
EVQLVESGGGLVKPGGSLRLSCAASGFTFSDYFMHWVRQAPGKGLEWVGVIDTKSFNYATYYSDLVKGRFTISRDDSKNTLYLQMNSLKTEDTAVYYCTATIAVPYYFDYWGQGTLVTVSSASTKGPSVFPLAPSSKSTSGGTAALGCLVKDYFPEPVTVSWNSGALTSGVHTFPAVLQSSGLYSLSSVVTVPSSSLGTQTYICNVNHKPSNTKVDKRVEPKSCDKTHTCPPCPAPELLGGPSVFLFPPKPKDTLMISRTPEVTCVVVDVEHEDPEVKFNWYVDGVEVHNAKTKPREEQYNSTYRVVSVLTVLHQDWLNGKEYKCKVSNKALPAPIEKTISKAKGQPREPQVYTLPPSREEMTKNQVSLTCLVKGFYPSDIAVEWESNGQPENNYKTTPPVLDSDGSFFLYSKLTVDKSRWQQGNVFSCSVMHEALHNHYTQKSLSLSPG

SEQ ID NO: 620 - protein, 213 aa, Artificial Sequence
  ICOS.33 IgGlf S267E light chain
DIQMTQSPSSLSASVGDRVTITCQASQDISNYLSWYQQKPGKAPKLLIYYTNLLAEGVPSRFSGSGSGTDFTFTISSLQPEDIATYYCQQYYNYRTFGPGTKVDIKRTVAAPSVFIFPPSDEQLKSGTASVVCLLNNFYPREAKVQWKVDNALQSGNSQESVTEQDSKDSTYSLSSTLTLSKADYEKHKVYACEVTHQGLSSPVTKSFNRGEC

1. A method of treating a disease or condition amenable to therapy by depleting regulatory T cells (Tregs) and/or increasing effector T cell (Teff) response in a subject in need thereof, the method comprising administering to the subject an anti-ICOS antibody or antigen-binding fragment thereof that binds the extracellular domain of human and/or mouse ICOS, wherein the anti-ICOS antibody or antigen-binding fragment thereof is administered to the subject at a dose of about 0.8 mg to 240 mg.

2. The method of claim 1, wherein the anti-ICOS antibody or antigen-binding fragment thereof comprises heavy chain complimentary determining regions (HCDRs) HCDR1, HCDR2, and HCDR3, and light chain complimentary determining regions (LCDRs) LCDR1, LCDR2, and LCDR3, wherein:
(a) HCDR1, HCDR2, and HCDR3 comprise sequences having at least 85%, 90%, or 95% sequence identity to the amino acid sequences SEQ ID NO: 363, SEQ ID NO: 364, and SEQ ID NO: 365 and LCDR1, LCDR2, and LCDR3 comprise sequences having at least 85%, 90%, or 95% sequence identity to the amino acid sequences SEQ ID NO: 370, SEQ ID NO: 371, SEQ ID NO: 372;
(b) HCDR1, HCDR2, and HCDR3 comprise the sequences having at least 85%, 90%, or 95% sequence identity to the amino acid sequences SEQ ID NO: 377, SEQ ID NO: 378, and SEQ ID NO: 379 and LCDR1, LCDR2, and LCDR3 comprise the sequences having at least 85%, 90%, or 95% sequence identity to the amino acid sequences SEQ ID NO: 384, SEQ ID NO: 385, SEQ ID NO: 386;
(c) HCDR1, HCDR2, and HCDR3 comprise the sequences having at least 85%, 90%, or 95% sequence identity to the amino acid sequences SEQ ID NO: 391, SEQ ID NO: 392, and SEQ ID NO: 393 and LCDR1, LCDR2, and LCDR3 comprise the sequences having at least 85%, 90%, or 95% sequence identity to the amino acid sequences SEQ ID NO: 398, SEQ ID NO: 399, SEQ ID NO: 400;
(d) HCDR1, HCDR2, and HCDR3 comprise the sequences having at least 85%, 90%, or 95% sequence identity to the amino acid sequences SEQ ID NO: 405, SEQ ID NO: 406, and SEQ ID NO: 407 and LCDR1, LCDR2, and LCDR3 comprise the sequences having at least 85%, 90%, or 95% sequence identity to the amino acid sequences SEQ ID NO: 412, SEQ ID NO: 413, SEQ ID NO: 414;
(e) HCDR1, HCDR2, and HCDR3 comprise the sequences having at least 85%, 90%, or 95% sequence identity to the amino acid sequences SEQ ID NO: 419, SEQ ID NO: 420, and SEQ ID NO: 421 and LCDR1, LCDR2, and LCDR3 comprise the sequences having at least 85%, 90%, or 95% sequence identity to the amino acid sequences SEQ ID NO: 426, SEQ ID NO: 427, SEQ ID NO: 428;
(f) HCDR1, HCDR2, and HCDR3 comprise the sequences having at least 85%, 90%, or 95% sequence identity to the amino acid sequences SEQ ID NO: 435, SEQ ID NO: 436, and SEQ ID NO: 437 and LCDR1, LCDR2, and LCDR3 comprise the sequences having at least 85%, 90%, or 95% sequence identity to the amino acid sequences SEQ ID NO: 442, SEQ ID NO: 443, SEQ ID NO: 444;
(g) HCDR1, HCDR2, and HCDR3 comprise the sequences having at least 85%, 90%, or 95% sequence identity to the amino acid sequences SEQ ID NO: 449, SEQ ID NO: 450, and SEQ ID NO: 451 and LCDR1, LCDR2, and LCDR3 comprise the sequences having at least 85%, 90%, or 95% sequence identity to the amino acid sequences SEQ ID NO: 456, SEQ ID NO: 457, SEQ ID NO: 458;
(h) HCDR1, HCDR2, and HCDR3 comprise the sequences having at least 85%, 90%, or 95% sequence identity to the amino acid sequences SEQ ID NO: 463, SEQ ID NO: 464, and SEQ ID NO: 465 and LCDR1, LCDR2, and LCDR3 comprise the sequences having at least 85%, 90%, or 95% sequence identity to the amino acid sequences SEQ ID NO: 470, SEQ ID NO: 471, SEQ ID NO: 472;
(i) HCDR1, HCDR2, and HCDR3 comprise the sequences having at least 85%, 90%, or 95% sequence identity to the amino acid sequences SEQ ID NO: 477, SEQ ID NO: 478, and SEQ ID NO: 479 and LCDR1, LCDR2, and LCDR3 comprise the sequences having at least 85%, 90%, or 95% sequence identity to the amino acid sequences SEQ ID NO: 484, SEQ ID NO: 485, SEQ ID NO: 486, or
(j) HCDR1, HCDR2, and HCDR3 comprise the sequences having at least 85%, 90%, or 95% sequence identity to the amino acid sequences SEQ ID NO: 491, SEQ ID NO: 492, and SEQ ID NO: 493 and LCDR1, LCDR2, and LCDR3 comprise the sequences having at least 85%, 90%, or 95% sequence identity to the amino acid sequences SEQ ID NO: 498, SEQ ID NO: 499, SEQ ID NO: 500.

3. The method of claim 1, wherein the anti-ICOS antibody or antigen-binding fragment thereof comprises heavy chain complimentary determining regions (HCDRs) HCDR1, HCDR2, and HCDR3, and light chain complimentary determining regions (LCDRs) LCDR1, LCDR2, and LCDR3, wherein:
(a) HCDR1 comprises the amino acid sequence SEQ ID NO: 363, HCDR2 comprises the amino acid sequence SEQ ID NO: 364, HCDR3 comprises the amino acid sequence SEQ ID NO: 365, LCDR1 comprises the amino acid sequence SEQ ID NO: 370, LCDR2 comprises the amino acid sequence SEQ ID NO: 371, and LCDR3 comprises the amino acid sequence SEQ ID NO: 372;
(b) HCDR1 comprises the amino acid sequence SEQ ID NO: 377, HCDR2 comprises the amino acid sequence SEQ ID NO: 378, HCDR3 comprises the amino acid sequence SEQ ID NO: 379, LCDR1 comprises the amino acid sequence SEQ ID NO: 384, LCDR2 comprises the amino acid sequence SEQ ID NO: 385, and LCDR3 comprises the amino acid sequence SEQ ID NO: 386;
(c) HCDR1 comprises the amino acid sequence SEQ ID NO: 391, HCDR2 comprises the amino acid sequence SEQ ID NO: 392, HCDR3 comprises the amino acid sequence SEQ ID NO: 393, LCDR1 comprises the amino acid sequence SEQ ID NO: 398, LCDR2 comprises the amino acid sequence SEQ ID NO: 399, and LCDR3 comprises the amino acid sequence SEQ ID NO: 400;
(d) HCDR1 comprises the amino acid sequence SEQ ID NO: 405, HCDR2 comprises the amino acid sequence SEQ ID NO: 406, HCDR3 comprises the amino acid sequence SEQ ID NO: 407, LCDR1 comprises the amino acid sequence SEQ ID NO: 412, LCDR2 comprises the amino acid sequence SEQ ID NO: 413, and LCDR3 comprises the amino acid sequence SEQ ID NO: 414;
(e) HCDR1 comprises the amino acid sequence SEQ ID NO: 419, HCDR2 comprises the amino acid sequence SEQ ID NO: 420, HCDR3 comprises the amino acid sequence SEQ ID NO: 421, LCDR1 comprises the amino acid sequence SEQ ID NO: 426, LCDR2 comprises the amino acid sequence SEQ ID NO: 427, and LCDR3 comprises the amino acid sequence SEQ ID NO: 428;
(f) HCDR1 comprises the amino acid sequence SEQ ID NO: 435, HCDR2 comprises the amino acid sequence SEQ ID NO: 436, HCDR3 comprises the amino acid sequence SEQ ID NO: 437, LCDR1 comprises the amino acid sequence SEQ ID NO: 442, LCDR2 comprises the amino acid sequence SEQ ID NO: 443, and LCDR3 comprises the amino acid sequence SEQ ID NO: 444;
(g) HCDR1 comprises the amino acid sequence SEQ ID NO: 449, HCDR2 comprises the amino acid sequence SEQ ID NO: 450, HCDR3 comprises the amino acid sequence SEQ ID NO: 451, LCDR1 comprises the amino acid sequence SEQ ID NO: 456, LCDR2 comprises the amino acid sequence SEQ ID NO: 457, and LCDR3 comprises the amino acid sequence SEQ ID NO: 458;
(h) HCDR1 comprises the amino acid sequence SEQ ID NO: 463, HCDR2 comprises the amino acid sequence SEQ ID NO: 464, HCDR3 comprises the amino acid sequence SEQ ID NO: 465, LCDR1 comprises the amino acid sequence SEQ ID NO: 470, LCDR2 comprises the amino acid sequence SEQ ID NO: 471, and LCDR3 comprises the amino acid sequence SEQ ID NO: 472;
(i) HCDR1 comprises the amino acid sequence SEQ ID NO: 477, HCDR2 comprises the amino acid sequence SEQ ID NO: 478, HCDR3 comprises the amino acid sequence SEQ ID NO: 479, LCDR1 comprises the amino acid sequence SEQ ID NO: 484, LCDR2 comprises the amino acid sequence SEQ ID NO: 485, and LCDR3 comprises the amino acid sequence SEQ ID NO: 486; or
(j) HCDR1 comprises the amino acid sequence SEQ ID NO: 491, HCDR2 comprises the amino acid sequence SEQ ID NO: 492, HCDR3 comprises the amino acid sequence SEQ ID NO: 493, LCDR1 comprises the amino acid sequence SEQ ID NO: 498, LCDR2 comprises the amino acid sequence SEQ ID NO: 499, and LCDR3 comprises the amino acid sequence SEQ ID NO: 500.

4. (canceled)

5. The method of claim 1, wherein the anti-ICOS antibody or antigen-binding fragment thereof comprises a heavy chain variable (V_{H}) domain and a light chain variable (V_{L}) domain, wherein:
(a) the V_{H} domain comprises a sequence having at least 85%, 90%, or 95% sequence identity to the amino acid sequence SEQ ID NO: 366 and the VL domain comprises a sequence having at least 85%, 90%, or 95% sequence identity to the amino acid sequence SEQ ID NO: 373;
(b) the V_{H} domain comprises a sequence having at least 85%, 90%, or 95% sequence identity to the amino acid sequence SEQ ID NO: 380 and the VL domain comprises a sequence having at least 85%, 90%, or 95% sequence identity to the amino acid sequence SEQ ID NO: 387;
(c) the V_{H} domain comprises a sequence having at least 85%, 90%, or 95% sequence identity to the amino acid sequence SEQ ID NO: 394 and the VL domain comprises a sequence having at least 85%, 90%, or 95% sequence identity to the amino acid sequence SEQ ID NO: 401;
(d) the V_{H} domain comprises a sequence having at least 85%, 90%, or 95% sequence identity to the amino acid sequence SEQ ID NO: 408 and VL domain comprises a sequence having at least 85%, 90%, or 95% sequence identity to the amino acid sequence SEQ ID NO: 415;
(e) the V_{H} domain comprises a sequence having at least 85%, 90%, or 95% sequence identity to the amino acid sequence SEQ ID NO: 422 and the VL domain comprises a sequence having at least 85%, 90%, or 95% sequence identity to the amino acid sequence SEQ ID NO: 429;
(f) the V_{H} domain comprises a sequence having at least 85%, 90%, or 95% sequence identity to the amino acid sequence SEQ ID NO: 438 and the VL domain comprises a sequence having at least 85%, 90%, or 95% sequence identity to the amino acid sequence SEQ ID NO: 445;
(g) the V_{H} domain comprises a sequence having at least 85%, 90%, or 95% sequence identity to the amino acid sequence SEQ ID NO: 452 and VL domain comprises a sequence having at least 85%, 90%, or 95% sequence identity to the amino acid sequence SEQ ID NO: 459;
(h) the V_{H} domain comprises a sequence having at least 85%, 90%, or 95% sequence identity to the amino acid sequence SEQ ID NO: 467 and the VL domain comprises a sequence having at least 85%, 90%, or 95% sequence identity to the amino acid sequence SEQ ID NO: 473;
(i) the V_{H} domain comprises a sequence having at least 85%, 90%, or 95% sequence identity to the amino acid sequence SEQ ID NO 481: and the VL domain comprises a sequence having at least 85%, 90%, or 95% sequence identity to the amino acid sequence SEQ ID NO: 488; or
(j) the V_{H} domain comprises a sequence having at least 85%, 90%, or 95% sequence identity to the amino acid sequence SEQ ID NO: 494 and the VL domain comprises a sequence having at least 85%, 90%, or 95% sequence identity to the amino acid sequence SEQ ID NO: 501.

6-8. (canceled)

9. The method of claim 1, wherein the anti-ICOS antibody or antigen binding fragment thereof comprises a heavy chain and a light chain, wherein:
(a) the heavy chain comprises a sequence having at least 85%, 90%, or 95% sequence identity to the amino acid sequence SEQ ID NO: 368 and the light chain comprises a sequence having at least 85%, 90%, or 95% sequence identity to the amino acid sequence SEQ ID NO: 375;
(b) the heavy chain comprises a sequence having at least 85%, 90%, or 95% sequence identity to the amino acid sequence SEQ ID NO: 385 and the light chain comprises a sequence having at least 85%, 90%, or 95% sequence identity to the amino acid sequence SEQ ID NO: 389;
(c) the heavy chain comprises a sequence having at least 85%, 90%, or 95% sequence identity to the amino acid sequence SEQ ID NO: 396 and the light chain comprises a sequence having at least 85%, 90%, or 95% sequence identity to the amino acid sequence SEQ ID NO: 403;
(d) the heavy chain comprises a sequence having at least 85%, 90%, or 95% sequence identity to the amino acid sequence SEQ ID NO: 410 and the light chain comprises a sequence having at least 85%, 90%, or 95% sequence identity to the amino acid sequence SEQ ID NO: 417;
(e) the heavy chain comprises a sequence having at least 85%, 90%, or 95% sequence identity to the amino acid sequence SEQ ID NO: 424 and the light chain comprises a sequence having at least 85%, 90%, or 95% sequence identity to the amino acid sequence SEQ ID NO: 432;
(f) the heavy chain comprises a sequence having at least 85%, 90%, or 95% sequence identity to the amino acid sequence SEQ ID NO: 440 and the light chain comprises a sequence having at least 85%, 90%, or 95% sequence identity to the amino acid sequence SEQ ID NO: 447;
(g) the heavy chain comprises a sequence having at least 85%, 90%, or 95% sequence identity to the amino acid sequence SEQ ID NO: 454 and the light chain comprises a sequence having at least 85%, 90%, or 95% sequence identity to the amino acid sequence SEQ ID NO: 461;
(h) the heavy chain comprises a sequence having at least 85%, 90%, or 95% sequence identity to the amino acid sequence SEQ ID NO: 468 and the light chain comprises a sequence having at least 85%, 90%, or 95% sequence identity to the amino acid sequence SEQ ID NO: 475;
(i) the heavy chain comprises a sequence having at least 85%, 90%, or 95% sequence identity to the amino acid sequence SEQ ID NO: 482 and the light chain comprises a sequence having at least 85%, 90%, or 95% sequence identity to the amino acid sequence SEQ ID NO: 489; or
(j) the heavy chain comprises a sequence having at least 85%, 90%, or 95% sequence identity to the amino acid sequence SEQ ID NO: 496 and the light chain comprises a sequence having at least 85%, 90%, or 95% sequence identity to the amino acid sequence SEQ ID NO: 503.

10. (canceled)

11. The method of claim 9, wherein:
(a) the heavy chain comprises the amino acid sequence SEQ ID NO: 368 and the light chain comprises the amino acid sequence SEQ ID NO: 375;
(b) the heavy chain comprises the amino acid sequence SEQ ID NO: 382 and the light chain comprises the amino acid sequence SEQ ID NO: 389;
(c) the heavy chain comprises the amino acid sequence SEQ ID NO: 396 and the light chain comprises the amino acid sequence SEQ ID NO: 403;
(d) the heavy chain comprises the amino acid sequence SEQ ID NO: 410 and the light chain comprises the amino acid sequence SEQ ID NO: 417;
(e) the heavy chain comprises the amino acid sequence SEQ ID NO: 424 and the light chain comprises the amino acid sequence SEQ ID NO: 432;
(f) the heavy chain comprises the amino acid sequence SEQ ID NO: 440 and the light chain comprises the amino acid sequence SEQ ID NO: 447;
(g) the heavy chain comprises the amino acid sequence SEQ ID NO: 454 and the light chain comprises the amino acid sequence SEQ ID NO: 461;
(h) the heavy chain comprises the amino acid sequence SEQ ID NO: 468 and the light chain comprises the amino acid sequence SEQ ID NO: 475;
(i) the heavy chain comprises the amino acid sequence SEQ ID NO: 482 and the light chain comprises the amino acid sequence SEQ ID NO: 489; or
(j) the heavy chain comprises the amino acid sequence SEQ ID NO: 496 and the light chain comprises the amino acid sequence SEQ ID NO: 503.

12-14. (canceled)

15. The method of claim 1, wherein the anti-ICOS antibody or antigen-binding fragment thereof is administered to the subject at a dose of about 0.5 mg to about 10 mg.

16. (canceled)

17. (canceled)

18. The method of claim 15, wherein the anti-ICOS antibody or antigen-binding fragment thereof is administered to the subject at a dose of about 0.8 mg to about 2.4 mg.

19. The method of claim 15, wherein the anti-ICOS antibody or antigen-binding fragment thereof is administered to the subject at a dose of about 2.4 mg to about 8 mg.

20-22. (canceled)

23. The method of claim 1, wherein the anti-ICOS antibody or antigen-binding fragment thereof is administered to the subject every 2-6 weeks, e.g., every 2 weeks, every 3 weeks, every 4 weeks, every 5 weeks, or every 6 weeks.

24. (canceled)

25. (canceled)

26. The method of claim 1, wherein the anti-ICOS antibody or antigen-binding fragment thereof is administered to the subject monthly.

27. The method of claim 1, wherein the anti-ICOS antibody or antigen-binding fragment thereof is administered to the subject for at least 6 months, e.g., for 6 months, 12 months, or more than 12 months.

28. The method of claim 1, further comprising administering to the subject a second therapeutic agent.

29. (canceled)

30. The method of claim 28, wherein the second therapeutic agent is atezolizumab.

31. The method of claim 30, wherein the anti-PD-L1 antibody or antigen-binding fragment thereof is administered to the subject at a dose of about 1200 mg.

32. The method of claim 30, wherein the anti-PD-L1 antibody or antigen-binding fragment thereof is administered to the subject every 2-6 weeks, e.g., every 2 weeks, every 3 weeks, every 4 weeks, every 5 weeks, or every 6 weeks.

33. (canceled)

34. (canceled)

35. The method of claim 30, wherein the anti-PD-L1 antibody or antigen-binding fragment thereof is administered to the subject monthly.

36. The method of claim 30, wherein the anti-PD-L1 antibody or antigen-binding fragment thereof is administered to the subject for at least 6 months, e.g., for 6 months, 12 months, or more than 12 months.

37. The method of claim 30, wherein the anti-PD-L1 antibody or antigen-binding fragment thereof is co-administered to the subject with the anti-ICOS antibody or antigen-binding fragment thereof every 3 weeks.

38. (canceled)

39. The method of claim 1, wherein the disease or condition amenable to therapy by depleting regulatory T cells (Tregs) and/or increasing effector T cell (Teff) response comprises a tumour or a cancer.

40-42. (canceled)
